(19) United States
(12) Patent Application Publication
(10) Pub. No.: US 2013/0274205 A1
(43) Pub. Date: Oct. 17, 2013

(54) PEPTIDOMIMETIC MACROCYCLES

(71) Applicant: Aileron Therapeutics, Inc., Cambridge, MA (US)

(72) Inventors: Vincent Guerlavais, Arlington, MA (US); Carl Elkin, Arlington, MA (US); Huw M. Nash, Lexington, MA (US); Tomi K. Sawyer, Southborough, MA (US); Bradford J. Graves, Nutley, NJ (US); Eric Feyfant, Lexington, MA (US)

(21) Appl. No.: 13/767,852

(22) Filed: Feb. 14, 2013

Related U.S. Application Data
(60) Provisional application No. 61/599,328, filed on Feb. 15, 2012.
(60) Provisional application No. 61/656,962, filed on Jun. 7, 2012.
(60) Provisional application No. 61/723,770, filed on Nov. 7, 2012.

(51) Int. Cl. C07K 7/54

(52) U.S. Cl. CPC C07K 7/54
USPC 514/21.1; 530/317

(57) ABSTRACT

Provided herein are peptidomimetic macrocycles and methods of using such macrocycles for the treatment of disease.

### CROSS-REFERENCE

[0001] This application claims the benefit of U.S. Provisional Application Nos. 61/599,328, filed Feb. 15, 2012, U.S. Provisional Application No. 61/656,962, filed Jun. 7, 2012, and U.S. Provisional Application No. 61/723,770, filed Nov. 7, 2012; all of which is incorporated herein by reference.

### BACKGROUND OF THE INVENTION

[0002] The human transcription factor protein p53 induces cell cycle arrest and apoptosis in response to DNA damage and cellular stress, and thereby plays a critical role in protecting cells from malignant transformation. The E3 ubiquitin ligase MDM2 (also known as HDM2) negatively regulates p53 function through a direct binding interaction that neutralizes the p53 transactivation activity, leads to export from the nucleus of p53 protein, and targets p53 for degradation via the ubiquitylation-proteasomal pathway. Loss of p53 activity, either by deletion, mutation, or MDM2 overexpression, is the most common defect in human cancers. Tumors that express wild type p53 are vulnerable to pharmacologic agents that stabilize or increase the concentration of active p53. In this context, inhibition of the activities of MDM2 has emerged as a validated approach to restore p53 activity and resensitize cancer cells to apoptosis in vitro and in vivo. MDMX (MDM4) has more recently been identified as a similar negative regulator of p53, and studies have revealed significant structural homology between the p53 binding interfaces of MDM2 and MDMX. The p53-MDM2 and p53-MDMX protein-protein interactions are mediated by the same 15-residue alpha-helical transactivation domain of p53, which inserts into hydrophobic clefts on the surface of MDM2 and MDMX. Three residues within this domain of p53 (F19, W23, and L26) are essential for binding to MDM2 and MDMX.

[0003] There remains a considerable need for compounds capable of binding to and modulating the activity of p53, MDM2 and/or MDMX. Provided herein are p53-based peptidomimetic macrocycles that modulate an activity of p53. Also provided herein are p53-based peptidomimetic macrocycles that inhibit the interactions between p53, MDM2 and/or MDMX proteins. Further, provided herein are p53-based peptidomimetic macrocycles that can be used for treating diseases including but not limited to cancer and other hyperproliferative diseases.

### SUMMARY OF THE INVENTION

[0004] Described herein are stably cross-linked peptides related to a portion of human p53 (“p53 peptidomimetic macrocycles”). These cross-linked peptides contain at least two modified amino acids that together form an intramolecular cross-link that can help to stabilize the alpha-helical secondary structure of a portion of p53 that is thought to be important for binding of p53 to MDM2 and for binding of p53 to MDMX.

[0005] Accordingly, a cross-linked polypeptide described herein can have improved biological activity relative to a corresponding polypeptide that is not cross-linked. The p53 peptidomimetic macrocycles are thought to interfere with binding of p53 to MDM2 and/or of p53 to MDMX, thereby liberating functional p53 and inhibiting its destruction. The p53 peptidomimetic macrocycles described herein can be used therapeutically, for example to treat cancers and other disorders characterized by an undesirably low level or a low activity of p53, and/or to treat cancers and other disorders characterized by an undesirably high level of activity of MDM2 or MDMX. The p53 peptidomimetic macrocycles can also be useful for treatment of any disorder associated with disrupted regulation of the p53 transcriptional pathway, leading to conditions of excess cell survival and proliferation such as cancer and autoimmunity, in addition to conditions of inappropriate cell cycle arrest and apoptosis such as neurodegeneration and immunedeficiencies. In some embodiments, the p53 peptidomimetic macrocycles bind to MDM2 (e.g., GenBank® Accession No.: 228952; GI:228952) and/or MDMX (also referred to as MDM4; GenBank® AccessionNo.: 88702791; GI:88702791).

[0006] In one aspect, provided herein is a peptidomimetic macrocycle comprising an amino acid sequence which is at least about 60%, 80%, 90%, or 95% identical to an amino acid sequence chosen from the group consisting of the amino acid sequences in Table 1, Table 1a, Table 1b, or Table 1c. Alternatively, an amino acid sequence of said peptidomimetic macrocycle is chosen from the group consisting of the amino acid sequences in Table 4. In some embodiments, the peptidomimetic macrocycle is not a peptide as shown in Table 2a or 2b. In other cases, the peptidomimetic macrocycle does not comprise a structure as shown in Table 2a or 2b. In some embodiments, the peptidomimetic macrocycle has an amino acid sequence chosen from Table 1. In some embodiments, the peptidomimetic macrocycle has an amino acid sequence chosen from Table 1a. In some embodiments, the peptidomimetic macrocycle has an amino acid sequence chosen from Table 1b. In some embodiments, the peptidomimetic macrocycle has an amino acid sequence chosen from Table 1c.

[0007] Alternatively, an amino acid sequence of said peptidomimetic macrocycle is chosen as above, and further wherein the macrocycle does not include a thioether or a triazole. In some embodiments, the peptidomimetic macrocycle comprises a helix, such as an α-helix. In other embodiments, the peptidomimetic macrocycle comprises an α,α-disubstituted amino acid. A peptidomimetic macrocycle can comprise a crosslinker linking the α-positions of at least two amino acids. At least one of said two amino acids can be an α,α-disubstituted amino acid.

[0008] In some embodiments, provided are peptidomimetic macrocycle of the formula:

[chemical structure]

[0009] wherein:
[0010] each A, C, D, and E is independently an amino acid;

[chemical structure]

[0011] B is an amino acid, [—NH-L₃-CO—], [—NH-L₃-SO₂—], or [—NH-L₃-];
[0012] R₁ and R₂ are independently —H, alkyl, alkenyl, alkynyl, arylalkyl, cycloalkyl, cycloalkylalkyl, heteroalkyl, or heterocycloalkyl, unsubstituted or substituted with halo-; or at least one of R₁ and R₂ forms a macrocycle-forming linker L′ connected to the alpha position of one of said D or E amino acids;
[0013] R₃ is hydrogen, alkyl, alkenyl, alkynyl, arylalkyl, heteroalkyl, cycloalkyl, heterocycloalkyl, cycloalkylalkyl, cycloaryl, or heterocycloaryl, optionally substituted with R₅;
[0014] each L or L′ is independently a macrocycle-forming linker of the formula -L₁-L₂-;
[0015] L₁ and L₂ and L₃ are independently alkylene, alkenylene, alkynylene, heteroalkylene, cycloalkylene, heterocycloalkylene, cycloarylene, heterocycloarylene, or [—R₄—K—R₄—]ₙ, each being optionally substituted with R₅;
[0016] each R₄ is alkylene, alkenylene, alkynylene, heteroalkylene, cycloalkylene, heterocycloalkylene, arylene, or heteroarylene;
[0017] each K is O, S, SO, SO₂, CO, CO₂, or CONR₃;
[0018] each R₅ is independently halogen, alkyl, —OR₆, —N(R₆)₂, —SR₆, —SOR₆, —SO₂R₆, —CO₂R₆, a fluorescent moiety, a radioisotope or a therapeutic agent;
[0019] each R₆ is independently —H, alkyl, alkenyl, alkynyl, arylalkyl, cycloalkylalkyl, heterocycloalkyl, a fluorescent moiety, a radioisotope or a therapeutic agent;
[0020] R₇ is —H, alkyl, alkenyl, alkynyl, arylalkyl, cycloalkyl, heteroalkyl, cycloalkylalkyl, heterocycloalkyl, cycloaryl, or heterocycloaryl, optionally substituted with R₅, or part of a cyclic structure with a D residue;
[0021] R₈ is —H, alkyl, alkenyl, alkynyl, arylalkyl, cycloalkyl, heteroalkyl, cycloalkylalkyl, heterocycloalkyl, cycloaryl, or heterocycloaryl, optionally substituted with R₅, or part of a cyclic structure with an E residue;
[0022] v and w are independently integers from 1-1000, for example 1-500, 1-200, 1-100, 1-50, 1-30, 1-20, or 1-10;
[0023] u is an integer from 1-10, for example 1-5, 1-3 or 1-2;
[0024] x, y and z are independently integers from 0-10, for example the sum of x+y+z is 2, 3, or 6; and
[0025] n is an integer from 1-5.

[0026] In some embodiments, w>2 and each of the first two amino acid represented by E comprises an uncharged side chain or a negatively charged side chain.

[0027] some embodiments, the first C-terminal amino acid and/or the second C-terminal amino acid represented by E comprise a hydrophobic side chain. For example, the first C-terminal amino acid and/or the second C-terminal amino acid represented by E comprises a hydrophobic side chain, for example a large hydrophobic side chain.

[0028] In some embodiments, w is between 3 and 1000. For example, the third amino acid represented by E comprises a large hydrophobic side chain.

[0029] In other embodiments, the peptidomimetic macrocycle as claimed excludes the sequence of: Ac-RTQATF$r8NQWAibAN1e$TNAibTR-NH₂, Ac-RTQATF$r8NQWAibAN1e$TNAibTR-NH₂, Ac-$r8SQQTFS$LWRLLAibQN-NH2, Ac-QSQ$r8TFSNLW$LLAibQN-NH2, Ac-QS$r5QTFStNLW$LLAibQN-NH2, or Ac-QSQQ$r8FSNLWR$LAibQN-NH2.

[0030] In other embodiments, the peptidomimetic macrocycle as claimed excludes the sequence of: Ac-Q$r8QQTFSN$WRLLAibQN-NH2.

[0031] Peptidomimetic macrocycles are also provided of the formula:

[chemical structure]

[0032] wherein:
[0033] each of Xaa₃, Xaa₅, Xaa₆, Xaa₇, Xaa₈, Xaa₉, and Xaa₁₀ is individually an amino acid, wherein at least three of Xaa₃, Xaa₅, Xaa₆, Xaa₇, Xaa₈, Xaa₉, and Xaa₁₀ are the same amino acid as the amino acid at the corresponding position of the sequence Phe₃-X₄—His₅-Tyr₆-Trp₇-Ala₈-Gln₉-Leu₁₀-X₁₁—Ser₁₂, where each X is an amino acid;
[0034] each D and E is independently an amino acid;
[0035] R₁ and R₂ are independently —H, alkyl, alkenyl, alkynyl, arylalkyl, cycloalkyl, cycloalkylalkyl, heteroalkyl, or heterocycloalkyl, unsubstituted or substituted with halo-; or at least one of R₁ and R₂ forms a macrocycle-forming linker L′ connected to the alpha position of one of said D or E amino acids;
[0036] each L or L′ is independently a macrocycle-forming linker of the formula -L₁-L₂-;
[0037] L₁ and L₂ are independently alkylene, alkenylene, alkynylene, heteroalkylene, cycloalkylene, heterocycloalkylene, cycloarylene, heterocycloarylene, or [—R₄—K—R₄—]ₙ, each being optionally substituted with R₅;
[0038] R₃ is hydrogen, alkyl, alkenyl, alkynyl, arylalkyl, heteroalkyl, cycloalkyl, heterocycloalkyl, cycloalkylalkyl, cycloaryl, or heterocycloaryl, optionally substituted with R₅;
[0039] each R₄ is alkylene, alkenylene, alkynylene, heteroalkylene, cycloalkylene, heterocycloalkylene, arylene, or heteroarylene;
[0040] each K is O, S, SO, SO₂, CO, CO₂, or CONR₃;
[0041] each R₅ is independently halogen, alkyl, —OR₆, —N(R₆)₂, —SR₆, —SOR₆, —SO₂R₆, —CO₂R₆, a fluorescent moiety, a radioisotope or a therapeutic agent;
[0042] each R₆ is independently —H, alkyl, alkenyl, alkynyl, arylalkyl, cycloalkylalkyl, heterocycloalkyl, a fluorescent moiety, a radioisotope or a therapeutic agent;
[0043] R₇ is —H, alkyl, alkenyl, alkynyl, arylalkyl, cycloalkyl, heteroalkyl, cycloalkylalkyl, heterocycloalkyl, cycloaryl, or heterocycloaryl, optionally substituted with R₅, or part of a cyclic structure with a D residue;
[0044] R₈ is —H, alkyl, alkenyl, alkynyl, arylalkyl, cycloalkyl, heteroalkyl, cycloalkylalkyl, heterocycloalkyl, cycloaryl, or heterocycloaryl, optionally substituted with R₅, or part of a cyclic structure with an E residue;
[0045] v is an integer from 1-1000, for example 1-500, 1-200, 1-100, 1-50, 1-30, 1-20, or 1-10;
[0046] w is an integer from 3-1000, for example 3-500, 3-200, 3-100, 3-50, 3-30, 3-20, or 3-10; and
[0047] n is an integer from 1-5.

[0048] In some embodiments, a peptidomimetic macrocycle has the Formula:

[chemical structure]

[0049] wherein:
[0050] each of Xaa₃, Xaa₅, Xaa₆, Xaa₇, Xaa₈, Xaa₉, and Xaa₁₀ is individually an amino acid, wherein at least three of Xaa₃, Xaa₅, Xaa₆, Xaa₇, Xaa₈, Xaa₉, and Xaa₁₀ are the same amino acid as the amino acid at the corresponding position of the sequence Phe₃-X₄-Glu₅-Tyr₆-Trp₇-Ala₈-Gln₉-Leu₁₀/Cba₁₀-X₁₁-Ala₁₂, where each X is an amino acid;
[0051] each D is independently an amino acid;
[0052] each E is independently an amino acid, for example an amino acid selected from Ala (alanine), D-Ala (D-alanine), Aib (α-aminoisobutyric acid), Sar (N-methyl glycine), and Ser (serine);
[0053] R₁ and R₂ are independently —H, alkyl, alkenyl, alkynyl, arylalkyl, cycloalkyl, cycloalkylalkyl, heteroalkyl, or heterocycloalkyl, unsubstituted or substituted with halo-; or at least one of R₁ and R₂ forms a macrocycle-forming linker L′ connected to the alpha position of one of said D or E amino acids;
[0054] each L or L′ is independently a macrocycle-forming linker of the formula -L₁-L₂-;
[0055] L₁ and L₂ are independently alkylene, alkenylene, alkynylene, heteroalkylene, cycloalkylene, heterocycloalkylene, cycloarylene, heterocycloarylene, or [—R₄—K—R₄—]ₙ, each being optionally substituted with R₅;
[0056] R₃ is hydrogen, alkyl, alkenyl, alkynyl, arylalkyl, heteroalkyl, cycloalkyl, heterocycloalkyl, cycloalkylalkyl, cycloaryl, or heterocycloaryl, optionally substituted with R₅;
[0057] each R₄ is alkylene, alkenylene, alkynylene, heteroalkylene, cycloalkylene, heterocycloalkylene, arylene, or heteroarylene;
[0058] each K is O, S, SO, SO₂, CO, CO₂, or CONR₃;
[0059] each R₅ is independently halogen, alkyl, —OR₆, —N(R₆)₂, —SR₆, —SOR₆, —SO₂R₆, —CO₂R₆, a fluorescent moiety, a radioisotope or a therapeutic agent;
[0060] each R₆ is independently —H, alkyl, alkenyl, alkynyl, arylalkyl, cycloalkylalkyl, heterocycloalkyl, a fluorescent moiety, a radioisotope or a therapeutic agent;
[0061] R₇ is —H, alkyl, alkenyl, alkynyl, arylalkyl, cycloalkyl, heteroalkyl, cycloalkylalkyl, heterocycloalkyl, cycloaryl, or heterocycloaryl, optionally substituted with R₅, or part of a cyclic structure with a D residue;
[0062] R₈ is —H, alkyl, alkenyl, alkynyl, arylalkyl, cycloalkyl, heteroalkyl, cycloalkylalkyl, heterocycloalkyl, cycloaryl, or heterocycloaryl, optionally substituted with R₅, or part of a cyclic structure with an E residue;
[0063] v is an integer from 1-1000, for example 1-500, 1-200, 1-100, 1-50, 1-30, 1-20, or 1-10;
[0064] w is an integer from 3-1000, for example 3-500, 3-200, 3-100, 3-50, 3-30, 3-20, or 3-10; and
[0065] n is an integer from 1-5.

[0066] In some embodiments, a peptidomimetic macrocycle has the Formula:

[chemical structure]

[0067] wherein:
[0068] each of Xaa₃, Xaa₅, Xaa₆, Xaa₇, Xaa₈, Xaa₉, and Xaa₁₀ is individually an amino acid, wherein at least two of Xaa₃, Xaa₅, Xaa₆, Xaa₈, Xaa₉, and Xaa₁₀ are the same amino acid as the amino acid at the corresponding position of the sequence Phe₃-X₄-Glu₅-Tyr₆-Trp₇-Ala₈-Gln₉-Leu₁₀/Cba₁₀-X₁₁-Ala₁₂, where each X is an amino acid;

[0069] each D and E is independently an amino acid;

[0070] R₁ and R₂ are independently —H, alkyl, alkenyl, alkynyl, arylalkyl, cycloalkyl, cycloalkylalkyl, heteroalkyl, or heterocycloalkyl, unsubstituted or substituted with halo-; or at least one of R₁ and R₂ forms a macrocycle-forming linker L′ connected to the alpha position of one of said D or E amino acids;
[0071] each L or L′ is independently a macrocycle-forming linker of the formula -L₁-L₂-, wherein L comprises at least one double bond in the E configuration;
[0072] L₁ and L₂ are independently alkylene, alkenylene, alkynylene, heteroalkylene, cycloalkylene, heterocycloalkylene, cycloarylene, heterocycloarylene, or [—R₄—K—R₄—]ₙ, each being optionally substituted with R₅;
[0073] R₃ is hydrogen, alkyl, alkenyl, alkynyl, arylalkyl, heteroalkyl, cycloalkyl, heterocycloalkyl, cycloalkylalkyl, cycloaryl, or heterocycloaryl, optionally substituted with R₅;
[0074] each R₄ is alkylene, alkenylene, alkynylene, heteroalkylene, cycloalkylene, heterocycloalkylene, arylene, or heteroarylene;
[0075] each K is O, S, SO, SO₂, CO, CO₂, or CONR₃;
[0076] each R₅ is independently halogen, alkyl, —OR₆, —N(R₆)₂, —SR₆, —SOR₆, —SO₂R₆, —CO₂R₆, a fluorescent moiety, a radioisotope or a therapeutic agent;
[0077] each R₆ is independently —H, alkyl, alkenyl, alkynyl, arylalkyl, cycloalkylalkyl, heterocycloalkyl, a fluorescent moiety, a radioisotope or a therapeutic agent;
[0078] R₇ is —H, alkyl, alkenyl, alkynyl, arylalkyl, cycloalkyl, heteroalkyl, cycloalkylalkyl, heterocycloalkyl, cycloaryl, or heterocycloaryl, optionally substituted with R₅, or part of a cyclic structure with a D residue;
[0079] R₈ is —H, alkyl, alkenyl, alkynyl, arylalkyl, cycloalkyl, heteroalkyl, cycloalkylalkyl, heterocycloalkyl, cycloaryl, or heterocycloaryl, optionally substituted with R₅, or part of a cyclic structure with an E residue;
[0080] v is an integer from 1-1000;
[0081] w is an integer from 3-1000;
[0082] n is an integer from 1-5; and
[0083] Xaa₇ is Boc-protected tryptophan.

[0084] In some embodiments of any of the Formulas described herein, [D]ᵥ is -Leu₁-Thr₂. In other embodiments of the Formulas described herein, each E other than the third amino acid represented by E is an amino acid selected from Ala (alanine), D-Ala (D-alanine), Aib (α-aminoisobutyric acid), Sar (N-methyl glycine), and Ser (serine).

[0085] In some embodiments, w is an integer from 3-10, for example 3-6, 3-8, 6-8, or 6-10. In some embodiments, w is 3. In other embodiments, w is 6. In some embodiments, v is an integer from 1-10, for example 2-5. In some embodiments, v is 2.

[0086] In some embodiments, peptides disclosed herein bind a binding site defined at least in part by the MDMX amino acid side chains of L17, V46, M50, Y96 (forming the rim of the pocket) and L99. Without being bound by theory, binding to such a binding site improves one or more properties such as binding affinity, induction of apoptosis, in vitro or in vivo anti-tumor efficacy, or reduced ratio of binding affinities to MDMX versus MDM2.

[0087] In some embodiments, the peptidomimetic macrocycle has improved binding affinity to MDM2 or MDMX relative to a corresponding peptidomimetic macrocycle where w is 0, 1 or 2. In other instances, the peptidomimetic macrocycle has a reduced ratio of binding affinities to MDMX versus MDM2 relative to a corresponding peptidomimetic macrocycle where w is 0, 1 or 2. In still other instances, the peptidomimetic macrocycle has improved in vitro anti-tumor efficacy against p53 positive tumor cell lines relative to a corresponding peptidomimetic macrocycle where w is 0, 1 or 2. In some embodiments, the peptidomimetic macrocycle shows improved in vitro induction of apoptosis in p53 positive tumor cell lines relative to a corresponding peptidomimetic macrocycle where w is 0, 1 or 2. In other instances, the peptidomimetic macrocycle of Claim 1, wherein the peptidomimetic macrocycle has an improved in vitro anti-tumor efficacy ratio for p53 positive versus p53 negative or mutant tumor cell lines relative to a corresponding peptidomimetic macrocycle where w is 0, 1 or 2. In some instances the improved efficacy ratio in vitro, is 1-29, ≧30-49, or ≧50. In still other instances, the peptidomimetic macrocycle has improved in vivo anti-tumor efficacy against p53 positive tumors relative to a corresponding peptidomimetic macrocycle where w is 0, 1 or 2. In some instances the improved efficacy ratio in vivo is −29, ≧30-49, or ≧50. In yet other instances, the peptidomimetic macrocycle has improved in vivo induction of apoptosis in p53 positive tumors relative to a corresponding peptidomimetic macrocycle where w is 0, 1 or 2. In some embodiments, the peptidomimetic macrocycle has improved cell permeability relative to a corresponding peptidomimetic macrocycle where w is 0, 1 or 2. In other cases, the peptidomimetic macrocycle has improved solubility relative to a corresponding peptidomimetic macrocycle where w is 0, 1 or 2.

[0088] In some embodiments, Xaa₅ is Glu or an amino acid analog thereof. In some embodiments, Xaa₅ is Glu or an amino acid analog thereof and wherein the peptidomimetic macrocycle has an improved property, such as improved binding affinity, improved solubility, improved cellular efficacy, improved cell permeability, improved in vivo or in vitro anti-tumor efficacy, or improved induction of apoptosis relative to a corresponding peptidomimetic macrocycle where Xaa₅ is Ala.

[0089] In some embodiments, the peptidomimetic macrocycle has improved binding affinity to MDM2 or MDMX relative to a corresponding peptidomimetic macrocycle where Xaa₅ is Ala. In other embodiments, the peptidomimetic macrocycle has a reduced ratio of binding affinities to MDMX vs MDM2 relative to a corresponding peptidomimetic macrocycle where Xaa₅ is Ala. In some embodiments, the peptidomimetic macrocycle has improved solubility relative to a corresponding peptidomimetic macrocycle where Xaa₅ is Ala, or the peptidomimetic macrocycle has improved cellular efficacy relative to a corresponding peptidomimetic macrocycle where Xaa₅ is Ala.

[0090] In some embodiments, Xaa₅ is Glu or an amino acid analog thereof and wherein the peptidomimetic macrocycle has improved biological activity, such as improved binding affinity, improved solubility, improved cellular efficacy, improved helicity, improved cell permeability, improved in vivo or in vitro anti-tumor efficacy, or improved induction of apoptosis relative to a corresponding peptidomimetic macrocycle where Xaa₅ is Ala.

[0091] In some embodiments, the peptidomimetic macrocycle has an activity against a p53+/+ cell line which is at least 2-fold, 3-fold, 5-fold, 10-fold, 20-fold, 30-fold, 50-fold, 70-fold, or 100-fold greater than its binding affinity against a p53−/− cell line. In some embodiments, the peptidomimetic macrocycle has an activity against a p53+/+ cell line which is between 1 and 29-fold, between 30 and 49-fold, or ≧50-fold greater than its binding affinity against a p53−/− cell line. Activity can be measured, for example, as an IC50 value. For example, the p53+/+ cell line is SJSA-1, RKO, HCT-116, or MCF-7 and the p53−/− cell line is RKO-E6 or SW-480. In some embodiments, the peptide has an IC50 against the p53+/+ cell line of less than 1 μM.

[0092] In some embodiments, Xaa₅ is Glu or an amino acid analog thereof and the peptidomimetic macrocycle has an activity against a p53+/+ cell line which is at least 10-fold greater than its binding affinity against a p53−/− cell line.

[0093] Additionally, a method is provided of treating cancer in a subject comprising administering to the subject a peptidomimetic macrocycle. In some embodiments, the cancer is head and neck cancer, melanoma, lung cancer, breast cancer, or glioma.

[0094] Also provided is a method of modulating the activity of p53 or MDM2 or MDMX in a subject comprising administering to the subject a peptidomimetic macrocycle, or a method of antagonizing the interaction between p53 and MDM2 and/or MDMX proteins in a subject comprising administering to the subject such a peptidomimetic macrocycle.

[0095] Provided herein is a method of preparing a composition comprising a peptidomimetic macrocycle of Formula (I):

[chemical structure]

comprising an amino acid sequence which is about 60% to about 100% identical to an amino acid sequence selected from the group consisting of the amino acid sequences in Table 1, Table 1a, Table 1b, or Table 1c, the method comprising treating a compound of Formula (II)

[chemical structure]

with a catalyst to result in the compound of Formula I
[0096] wherein in the compound(s) of Formulae (I) and (II)
[0097] each A, C, D, and E is independently an amino acid;
[0098] each B is independently an amino acid,

[chemical structure]

[0099] [—NH-L₃-CO—], [—NH-L₃-SO₂—], or [—NH-L₃-];
[0100] each R₁ and R₂ are independently hydrogen, alkyl, alkenyl, alkynyl, arylalkyl, cycloalkyl, cycloalkylalkyl, heteroalkyl, or heterocycloalkyl, unsubstituted or substituted with halogen; or at least one of R₁ and R₂ forms a macrocycle-forming linker L′ connected to the alpha position of one of the D or E amino acids;
[0101] each R₃ is independently hydrogen, alkyl, alkenyl, alkynyl, arylalkyl, heteroalkyl, cycloalkyl, heterocycloalkyl, cycloalkylalkyl, cycloaryl, or heterocycloaryl, optionally substituted with R₅;
[0102] each L′ is independently a macrocycle-forming linker of the formula -L₁-L₂-;
[0103] each L₁, L₂ and L₃ are independently alkylene, alkenylene, alkynylene, heteroalkylene, cycloalkylene, heterocycloalkylene, cycloarylene, heterocycloarylene, or [—R₄—K—R_{4′}]ₙ, each being optionally substituted with R₅;
[0104] each R₄ and R_{4′} is independently alkylene, alkenylene, alkynylene, heteroalkylene, cycloalkylene, heterocycloalkylene, arylene, or heteroarylene;
[0105] each K is independently O, S, SO, SO₂, CO, CO₂, or CONR₃;
[0106] each R₅ is independently halogen, alkyl, —OR₆, —N(R₆)₂, —SR₆, —SOR₆, —SO₂R₆, —CO₂R₆, a fluorescent moiety, a radioisotope or a therapeutic agent;
[0107] each R₆ is independently hydrogen, alkyl, alkenyl, alkynyl, arylalkyl, cycloalkylalkyl, heterocycloalkyl, a fluorescent moiety, a radioisotope or a therapeutic agent;
[0108] each R₇ is independently hydrogen, alkyl, alkenyl, alkynyl, arylalkyl, cycloalkyl, heteroalkyl, cycloalkylalkyl, heterocycloalkyl, cycloaryl, or heterocycloaryl, optionally substituted with R₅, or part of a cyclic structure with a D residue;
[0109] each R₈ is independently hydrogen, alkyl, alkenyl, alkynyl, arylalkyl, cycloalkyl, heteroalkyl, cycloalkylalkyl, heterocycloalkyl, cycloaryl, or heterocycloaryl, optionally substituted with R₅, or part of a cyclic structure with an E residue;
[0110] each v and w are independently integers from 1-1000;
[0111] u is an integer from 1-10;
[0112] each x, y and z are independently integers from 0-10;
[0113] each n is independently an integer from 1-5;
[0114] each o is independently an integer from 1 to 15;
[0115] each p is independently an integer from 1 to 15;
[0116] “(E)” indicates a trans double bond; and
[0117] one or more of the amino acids A, C and/or B when B is an amino acid, present in the compounds of Formulae (I) and (II), has a side chain bearing a protecting group.

[0118] In some embodiments, the protecting group is a nitrogen atom protecting group.

[0119] In some embodiments, the protecting group is a Boc group.

[0120] In some embodiments, the side chain of the amino acid bearing the protecting group comprises a protected indole.

[0121] In some embodiments, the amino acid bearing the protecting group on its side chain is tryptophan (W) that is protected by the protecting group on its indole nitrogen. For example, the protecting group is a Boc group.

[0122] In some embodiments, after the step of contacting the compound of Formula II with catalyst the compound of Formula (I) is obtained in equal or higher amounts than a corresponding compound which is a Z isomer. For example, after the step of contacting the compound of Formula II with catalyst the compound of Formula (I) is obtained in a 2, 3, 4, 5, 6, 7, 8, 9, or 10-fold higher amount than the corresponding compound which is a Z isomer.

[0123] In some embodiments, the catalyst is a ruthenium catalyst.

[0124] In some embodiments, the method further comprises the step of treating the compounds of Formula (I) with a reducing agent or an oxidizing agent.

[0125] In some embodiments, the compound of Formula (II) is attached to a solid support. In other embodiments, the compound of Formula (II) is not attached to a solid support.

[0126] In some embodiments, the method further comprises removing the protecting group(s) from the compounds of Formula (I).

[0127] In some embodiments, the ring closing metathesis is conducted at a temperature ranging from about 20° C. to about 80° C.

[0128] In some embodiments, the peptidomimetic macrocycle of Formula (I) has the Formula:

[chemical structure]

[0129] wherein:
[0130] each of Xaa₃, Xaa₅, Xaa₆, Xaa₇, Xaa₈, Xaa₉, and Xaa₁₀ is individually an amino acid, wherein at least two of Xaa₃, Xaa₅, Xaa₆, Xaa₈, Xaa₉, and Xaa₁₀ are the same amino acid as the amino acid at the corresponding position of the sequence Phe₃-X₄—His₅-Tyr₆-Trp₇-Ala₈-Gln₉-Leu₁₀-X₁₁—Ser₁₂, where each X is an amino acid;
[0131] each D and E is independently an amino acid;
[0132] R₁ and R₂ are independently —H, alkyl, alkenyl, alkynyl, arylalkyl, cycloalkyl, cycloalkylalkyl, heteroalkyl, or heterocycloalkyl, unsubstituted or substituted with halo-; or at least one of R₁ and R₂ forms a macrocycle-forming linker L′ connected to the alpha position of one of said D or E amino acids;
[0133] each L or L′ is independently a macrocycle-forming linker of the formula -L₁-L₂-, wherein L comprises at least one double bond in the E configuration;
[0134] L₁ and L₂ are independently alkylene, alkenylene, alkynylene, heteroalkylene, cycloalkylene, heterocycloalkylene, cycloarylene, heterocycloarylene, or [—R₄—K—R₄—]ₙ, each being optionally substituted with R₅;
[0135] R₃ is hydrogen, alkyl, alkenyl, alkynyl, arylalkyl, heteroalkyl, cycloalkyl, heterocycloalkyl, cycloalkylalkyl, cycloaryl, or heterocycloaryl, optionally substituted with R₅;
[0136] each R₄ is alkylene, alkenylene, alkynylene, heteroalkylene, cycloalkylene, heterocycloalkylene, arylene, or heteroarylene;
[0137] each K is O, S, SO, SO₂, CO, CO₂, or CONR₃;
[0138] each R₅ is independently halogen, alkyl, —OR₆, —N(R₆)₂, —SR₆, —SOR₆, —SO₂R₆, —CO₂R₆, a fluorescent moiety, a radioisotope or a therapeutic agent;
[0139] each R₆ is independently —H, alkyl, alkenyl, alkynyl, arylalkyl, cycloalkylalkyl, heterocycloalkyl, a fluorescent moiety, a radioisotope or a therapeutic agent;
[0140] R₇ is —H, alkyl, alkenyl, alkynyl, arylalkyl, cycloalkyl, heteroalkyl, cycloalkylalkyl, heterocycloalkyl, cycloaryl, or heterocycloaryl, optionally substituted with R₅, or part of a cyclic structure with a D residue;
[0141] R₈ is —H, alkyl, alkenyl, alkynyl, arylalkyl, cycloalkyl, heteroalkyl, cycloalkylalkyl, heterocycloalkyl, cycloaryl, or heterocycloaryl, optionally substituted with R₅, or part of a cyclic structure with an E residue;
[0142] v is an integer from 1-1000;
[0143] w is an integer from 3-1000;
[0144] n is an integer from 1-5; and
[0145] Xaa₇ is Boc-protected tryptophan.

[0146] In some embodiments, the peptidomimetic macrocycle of Formula (I) comprises an α-helix.

### INCORPORATION BY REFERENCE

[0147] All publications, patents, and patent applications mentioned in this specification are herein incorporated by reference to the same extent as if each individual publication, patent, or patent application was specifically and individually indicated to be incorporated by reference.

### BRIEF DESCRIPTION OF THE DRAWINGS

[0148] The novel features of the invention are set forth with particularity in the appended claims. A better understanding of the features and advantages of the present invention will be obtained by reference to the following detailed description that sets forth illustrative embodiments, in which the principles of the invention are utilized, and the accompanying drawings of which:

[0149] FIG. 1 shows a structure of peptidomimetic macrocycle 46 (Table 2b), a p53 peptidomimetic macrocycle, complexed with MDMX (Primary SwissProt accession number Q7ZUW7; Entry MDM4_DANRE).

[0150] FIG. 2 shows overlaid structures of p53 peptidomimetic macrocycles 142 (Table 2b) and SP43 bound to MDMX (Primary SwissProt accession number Q7ZUW7; Entry MDM4_DANRE).

[0151] FIG. 3 shows the effect of SP154, a peptidomimetic macrocycle, on tumor growth in a mouse MCF-7 xenograft model.

[0152] FIG. 4 shows the effect of SP249, a peptidomimetic macrocycle, on tumor growth in a mouse MCF-7 xenograft model.

[0153] FIG. 5 shows the effect of SP315, a peptidomimetic macrocycle, on tumor growth in a mouse MCF-7 xenograft model.

[0154] FIG. 6 shows the effect of SP252, a point mutation of SP154, on tumor growth in a mouse MCF-7 xenograft model.

[0155] FIG. 7 shows a plot of solubility for peptidomimetic macrocycles with varying C-terminal extensions.

### DETAILED DESCRIPTION OF THE INVENTION

[0156] As used herein, the term “macrocycle” refers to a molecule having a chemical structure including a ring or cycle formed by at least 9 covalently bonded atoms.

[0157] As used herein, the term “peptidomimetic macrocycle” or “crosslinked polypeptide” refers to a compound comprising a plurality of amino acid residues joined by a plurality of peptide bonds and at least one macrocycle-forming linker which forms a macrocycle between a first naturally-occurring or non-naturally-occurring amino acid residue (or analog) and a second naturally-occurring or non-naturally-occurring amino acid residue (or analog) within the same molecule. Peptidomimetic macrocycle include embodiments where the macrocycle-forming linker connects the α carbon of the first amino acid residue (or analog) to the α carbon of the second amino acid residue (or analog). The peptidomimetic macrocycles optionally include one or more non-peptide bonds between one or more amino acid residues and/or amino acid analog residues, and optionally include one or more non-naturally-occurring amino acid residues or amino acid analog residues in addition to any which form the macrocycle. A “corresponding uncrosslinked polypeptide” when referred to in the context of a peptidomimetic macrocycle is understood to relate to a polypeptide of the same length as the macrocycle and comprising the equivalent natural amino acids of the wild-type sequence corresponding to the macrocycle.

[0158] As used herein, the term “stability” refers to the maintenance of a defined secondary structure in solution by a peptidomimetic macrocycle as measured by circular dichroism, NMR or another biophysical measure, or resistance to proteolytic degradation in vitro or in vivo. Non-limiting examples of secondary structures contemplated herein are α-helices, 3₁₀ helices, β-turns, and β-pleated sheets.

[0159] As used herein, the term “helical stability” refers to the maintenance of α helical structure by a peptidomimetic macrocycle as measured by circular dichroism or NMR. For example, in some embodiments, a peptidomimetic macrocycle exhibits at least a 1.25, 1.5, 1.75 or 2-fold increase in α-helicity as determined by circular dichroism compared to a corresponding uncrosslinked macrocycle.

[0160] The term “amino acid” refers to a molecule containing both an amino group and a carboxyl group. Suitable amino acids include, without limitation, both the D- and L-isomers of the naturally-occurring amino acids, as well as non-naturally occurring amino acids prepared by organic synthesis or other metabolic routes. The term amino acid, as used herein, includes, without limitation, α-amino acids, natural amino acids, non-natural amino acids, and amino acid analogs.

[0161] The term “α-amino acid” refers to a molecule containing both an amino group and a carboxyl group bound to a carbon which is designated the α-carbon.

[0162] The term “β-amino acid” refers to a molecule containing both an amino group and a carboxyl group in a β configuration.

[0163] The term “naturally occurring amino acid” refers to any one of the twenty amino acids commonly found in peptides synthesized in nature, and known by the one letter abbreviations A, R, N, C, D, Q, E, G, H, I, L, K, M, F, P, S, T, W, Y and V.

[0164] The following table shows a summary of the properties of natural amino acids:

| | 3- | 1- | Side- | Side-chain | |
|---|---|---|---|---|---|
| | Letter | Letter | chain | charge | Hydropathy |
| Amino Acid | Code | Code | Polarity | (pH 7.4) | Index |
| Alanine | Ala | A | nonpolar | neutral | 1.8 |
| Arginine | Arg | R | polar | positive | −4.5 |
| Asparagine | Asn | N | polar | neutral | −3.5 |
| Aspartic acid | Asp | D | polar | negative | −3.5 |
| Cysteine | Cys | C | polar | neutral | 2.5 |
| Glutamic acid | Glu | E | polar | negative | −3.5 |
| Glutamine | Gln | Q | polar | neutral | −3.5 |
| Glycine | Gly | G | nonpolar | neutral | −0.4 |
| Histidine | His | H | polar | positive(10%) | −3.2 |
| | | | | neutral(90%) | |
| Isoleucine | Ile | I | nonpolar | neutral | 4.5 |
| Leucine | Leu | L | nonpolar | neutral | 3.8 |
| Lysine | Lys | K | polar | positive | −3.9 |
| Methionine | Met | M | nonpolar | neutral | 1.9 |
| Phenylalanine | Phe | F | nonpolar | neutral | 2.8 |
| Proline | Pro | P | nonpolar | neutral | −1.6 |
| Serine | Ser | S | polar | neutral | −0.8 |
| Threonine | Thr | T | polar | neutral | −0.7 |
| Tryptophan | Trp | W | nonpolar | neutral | −0.9 |
| Tyrosine | Tyr | Y | polar | neutral | −1.3 |
| Valine | Val | V | nonpolar | neutral | 4.2 |

[0165] “Hydrophobic amino acids” include small hydrophobic amino acids and large hydrophobic amino acids. “Small hydrophobic amino acid” are glycine, alanine, proline, and analogs thereof “Large hydrophobic amino acids” are valine, leucine, isoleucine, phenylalanine, methionine, tryptophan, and analogs thereof. “Polar amino acids” are serine, threonine, asparagine, glutamine, cysteine, tyrosine, and analogs thereof “Charged amino acids” are lysine, arginine, histidine, aspartate, glutamate, and analogs thereof.

[0166] The term “amino acid analog” refers to a molecule which is structurally similar to an amino acid and which can be substituted for an amino acid in the formation of a peptidomimetic macrocycle Amino acid analogs include, without limitation, β-amino acids and amino acids where the amino or carboxy group is substituted by a similarly reactive group (e.g., substitution of the primary amine with a secondary or tertiary amine, or substitution of the carboxy group with an ester).

[0167] The term “non-natural amino acid” refers to an amino acid which is not one of the twenty amino acids commonly found in peptides synthesized in nature, and known by the one letter abbreviations A, R, N, C, D, Q, E, G, H, I, L, K, M, F, P, S, T, W, Y and V. Non-natural amino acids or amino acid analogs include, without limitation, structures according to the following:

[chemical structure]

[chemical structure]

[chemical structure]

[chemical structure]

[chemical structure]

[chemical structure]

[chemical structure]

[0168] Amino acid analogs include β-amino acid analogs. Examples of β-amino acid analogs include, but are not limited to, the following: cyclic β-amino acid analogs; β-alanine; (R)-β-phenylalanine; (R)-1,2,3,4-tetrahydro-isoquinoline-3-acetic acid; (R)-3-amino-4-(1-naphthyl)-butyric acid; (R)-3-amino-4-(2,4-dichlorophenyl)butyric acid; (R)-3-amino-4-(2-chlorophenyl)-butyric acid; (R)-3-amino-4-(2-cyanophenyl)-butyric acid; (R)-3-amino-4-(2-fluorophenyl)-butyric acid; (R)-3-amino-4-(2-furyl)-butyric acid; (R)-3-amino-4-(2-methylphenyl)-butyric acid; (R)-3-amino-4-(2-naphthyl)-butyric acid; (R)-3-amino-4-(2-thienyl)-butyric acid; (R)-3-amino-4-(2-trifluoromethylphenyl)-butyric acid; (R)-3-amino-4-(3,4-dichlorophenyl)butyric acid; (R)-3-amino-4-(3,4-difluorophenyl)butyric acid; (R)-3-amino-4-(3-benzothienyl)-butyric acid; (R)-3-amino-4-(3-chlorophenyl)-butyric acid; (R)-3-amino-4-(3-cyanophenyl)-butyric acid; (R)-3-amino-4-(3-fluorophenyl)-butyric acid; (R)-3-amino-4-(3-methylphenyl)-butyric acid; (R)-3-amino-4-(3-pyridyl)-butyric acid; (R)-3-amino-4-(3-thienyl)-butyric acid; (R)-3-amino-4-(3-trifluoromethylphenyl)-butyric acid; (R)-3-amino-4-(4-bromophenyl)-butyric acid; (R)-3-amino-4-(4-chlorophenyl)-butyric acid; (R)-3-amino-4-(4-cyanophenyl)-butyric acid; (R)-3-amino-4-(4-fluorophenyl)-butyric acid; (R)-3-amino-4-(4-iodophenyl)-butyric acid; (R)-3-amino-4-(4-methylphenyl)-butyric acid; (R)-3-amino-4-(4-nitrophenyl)-butyric acid; (R)-3-amino-4-(4-pyridyl)-butyric acid; (R)-3-amino-4-(4-trifluoromethylphenyl)-butyric acid; (R)-3-amino-4-pentafluoro-phenylbutyric acid; (R)-3-amino-5-hexenoic acid; (R)-3-amino-5-hexynoic acid; (R)-3-amino-5-phenylpentanoic acid; (R)-3-amino-6-phenyl-5-hexenoic acid; (S)-1,2,3,4-tetrahydro-isoquinoline-3-acetic acid; (S)-3-amino-4-(1-naphthyl)-butyric acid; (S)-3-amino-4-(2,4-dichlorophenyl)butyric acid; (S)-3-amino-4-(2-chlorophenyl)-butyric acid; (S)-3-amino-4-(2-cyanophenyl)-butyric acid; (S)-3-amino-4-(2-fluorophenyl)-butyric acid; (S)-3-amino-4-(2-furyl)-butyric acid; (S)-3-amino-4-(2-methylphenyl)-butyric acid; (S)-3-amino-4-(2-naphthyl)-butyric acid; (S)-3-amino-4-(2-thienyl)-butyric acid; (S)-3-amino-4-(2-trifluoromethylphenyl)-butyric acid; (S)-3-amino-4-(3,4-dichlorophenyl)butyric acid; (S)-3-amino-4-(3,4-difluorophenyl)butyric acid; (S)-3-amino-4-(3-benzothienyl)-butyric acid; (S)-3-amino-4-(3-chlorophenyl)-butyric acid; (S)-3-amino-4-(3-cyanophenyl)-butyric acid; (S)-3-amino-4-(3-fluorophenyl)-butyric acid; (S)-3-amino-4-(3-methylphenyl)-butyric acid; (S)-3-amino-4-(3-pyridyl)-butyric acid; (S)-3-amino-4-(3-thienyl)-butyric acid; (S)-3-amino-4-(3-trifluoromethylphenyl)-butyric acid; (S)-3-amino-4-(4-bromophenyl)-butyric acid; (S)-3-amino-4-(4-chlorophenyl) butyric acid; (S)-3-amino-4-(4-cyanophenyl)-butyric acid; (S)-3-amino-4-(4-fluorophenyl) butyric acid; (S)-3-amino-4-(4-iodophenyl)-butyric acid; (S)-3-amino-4-(4-methylphenyl)-butyric acid; (S)-3-amino-4-(4-nitrophenyl)-butyric acid; (S)-3-amino-4-(4-pyridyl)-butyric acid; (S)-3-amino-4-(4-trifluoromethylphenyl)-butyric acid; (S)-3-amino-4-pentafluoro-phenylbutyric acid; (S)-3-amino-5-hexenoic acid; (S)-3-amino-5-hexynoic acid; (S)-3-amino-5-phenylpentanoic acid; (S)-3-amino-6-phenyl-5-hexenoic acid; 1,2,5,6-tetrahydropyridine-3-carboxylic acid; 1,2,5,6-tetrahydropyridine-4-carboxylic acid; 3-amino-3-(2-chlorophenyl)-propionic acid; 3-amino-3-(2-thienyl)-propionic acid; 3-amino-3-(3-bromophenyl)-propionic acid; 3-amino-3-(4-chlorophenyl)-propionic acid; 3-amino-3-(4-methoxyphenyl)-propionic acid; 3-amino-4,4,4-trifluoro-butyric acid; 3-aminoadipic acid; D-β-phenylalanine; β-leucine; L-β-homoalanine; L-β-homoaspartic acid γ-benzyl ester; L-β-homoglutamic acid δ-benzyl ester; L-β-homoisoleucine; L-β-homoleucine; L-β-homomethionine; L-β-homophenylalanine; L-β-homoproline; L-β-homotryptophan; L-β-homovaline; L-Nω-benzyloxycarbonyl-β-homolysine; Nω-L-β-homoarginine; O-benzyl-L-β-homohydroxyproline; O-benzyl-L-β-homoserine; O-benzyl-L-β-homothreonine; O-benzyl-L-β-homotyrosine; γ-trityl-L-β-homoasparagine; (R)-β-phenylalanine; L-β-homoaspartic acid γ-t-butyl ester; L-β-homoglutamic acid δ-t-butyl ester; L-Nω-β-homolysine; Nδ-trityl-L-β-homoglutamine; Nω-2,2,4,6,7-pentamethyl-dihydrobenzofuran-5-sulfonyl-L-β-homoarginine; O-t-butyl-L-β-homohydroxy-proline; O-t-butyl-L-β-homoserine; O-t-butyl-L-β-homothreonine; O-t-butyl-L-β-homotyrosine; 2-aminocyclopentane carboxylic acid; and 2-aminocyclohexane carboxylic acid.

[0169] Amino acid analogs include analogs of alanine, valine, glycine or leucine. Examples of amino acid analogs of alanine, valine, glycine, and leucine include, but are not limited to, the following: α-methoxyglycine; α-allyl-L-alanine; α-aminoisobutyric acid; α-methyl-leucine; β-(1-naphthyl)-D-alanine; β-(1-naphthyl)-L-alanine; β-(2-naphthyl)-D-alanine; β-(2-naphthyl)-L-alanine; β-(2-pyridyl)-D-alanine; β-(2-pyridyl)-L-alanine; β-(2-thienyl)-D-alanine; β-(2-thienyl)-L-alanine; β-(3-benzothienyl)-D-alanine; β-(3-benzothienyl)-L-alanine; β-(3-pyridyl)-D-alanine; β-(3-pyridyl)-L-alanine; β-(4-pyridyl)-D-alanine; β-(4-pyridyl)-L-alanine; β-chloro-L-alanine; β-cyano-L-alanin; β-cyclohexyl-D-alanine; β-cyclohexyl-L-alanine; β-cyclopenten-1-yl-alanine; β-cyclopentyl-alanine; β-cyclopropyl-L-Ala-OH.dicyclohexylammonium salt; β-t-butyl-D-alanine; β-t-butyl-L-alanine; γ-aminobutyric acid; L-α,β-diaminopropionic acid; 2,4-dinitro-phenylglycine; 2,5-dihydro-D-phenylglycine; 2-amino-4,4,4-trifluorobutyric acid; 2-fluoro-phenylglycine; 3-amino-4,4,4-trifluoro-butyric acid; 3-fluoro-valine; 4,4,4-trifluoro-valine; 4,5-dehydro-L-leu-OH.dicyclohexylammonium salt; 4-fluoro-D-phenylglycine; 4-fluoro-L-phenylglycine; 4-hydroxy-D-phenylglycine; 5,5,5-trifluoro-leucine; 6-aminohexanoic acid; cyclopentyl-D-Gly-OH.dicyclohexylammonium salt; cyclopentyl-Gly-OH.dicyclohexylammonium salt; D-α,β-diaminopropionic acid; D-α-aminobutyric acid; D-α-t-butylglycine; D-(2-thienyl)glycine; D-(3-thienyl)glycine; D-2-aminocaproic acid; D-2-indanylglycine; D-allylglycine-dicyclohexylammonium salt; D-cyclohexylglycine; D-norvaline; D-phenylglycine; β-aminobutyric acid; β-aminoisobutyric acid; (2-bromophenyl)glycine; (2-methoxyphenyl)glycine; (2-methylphenyl)glycine; (2-thiazoyl)glycine; (2-thienyl)glycine; 2-amino-3-(dimethylamino)-propionic acid; L-α,β-diaminopropionic acid; L-α-aminobutyric acid; L-α-t-butylglycine; L-(3-thienyl)glycine; L-2-amino-3-(dimethylamino)-propionic acid; L-2-aminocaproic acid dicyclohexyl-ammonium salt; L-2-indanylglycine; L-allylglycine.dicyclohexyl ammonium salt; L-cyclohexylglycine; L-phenylglycine; L-propargylglycine; L-norvaline; N-α-aminomethyl-L-alanine; D-α,γ-diaminobutyric acid; L-α,γ-diaminobutyric acid; β-cyclopropyl-L-alanine; (N-β-(2,4-dinitrophenyl))-L-α,β-diaminopropionic acid; (N-β-1-(4,4-dimethyl-2,6-dioxocyclohex-1-ylidene)ethyl)-D-α,β-diaminopropionic acid; (N-β-1-(4,4-dimethyl-2,6-dioxocyclohex-1-ylidene)ethyl)-L-α,β-diaminopropionic acid; (N-β-4-methyltrityl)-L-α,β-diaminopropionic acid; (N-β-allyloxycarbonyl)-L-α,β-diaminopropionic acid; (N-γ-1-(4,4-dimethyl-2,6-dioxocyclohex-1-ylidene)ethyl)-D-α,γ-diaminobutyric acid; (N-γ-1-(4,4-dimethyl-2,6-dioxocyclohex-1-ylidene)ethyl)-L-α,γ-diaminobutyric acid; (N-γ-4-methyltrityl)-D-α,γ-diaminobutyric acid; (N-γ-4-methyltrityl)-L-α,γ-diaminobutyric acid; (N-γ-allyloxycarbonyl)-L-α,γ-diaminobutyric acid; D-α,γ-diaminobutyric acid; 4,5-dehydro-L-leucine; cyclopentyl-D-Gly-OH; cyclopentyl-Gly-OH; D-allylglycine; D-homocyclohexylalanine; L-1-pyrenylalanine; L-2-aminocaproic acid; L-allylglycine; L-homocyclohexylalanine; and N-(2-hydroxy-4-methoxy-Bzl)-Gly-OH.

[0170] Amino acid analogs include analogs of arginine or lysine. Examples of amino acid analogs of arginine and lysine include, but are not limited to, the following: citrulline; L-2-amino-3-guanidinopropionic acid; L-2-amino-3-ureidopropionic acid; L-citrulline; Lys(Me)₂-OH; Lys(N₃)—OH; Nδ-benzyloxycarbonyl-L-ornithine; Nω-nitro-D-arginine; Nω-nitro-L-arginine; α-methyl-ornithine; 2,6-diaminoheptanedioic acid; L-ornithine; (Nδ-1-(4,4-dimethyl-2,6-dioxo-cyclohex-1-ylidene)ethyl)-D-ornithine; (Nδ-1-(4,4-dimethyl-2,6-dioxo-cyclohex-1-ylidene)ethyl)-L-ornithine; (Nδ-4-methyltrityl)-D-ornithine; (Nδ-4-methyltrityl)-L-ornithine; D-ornithine; L-ornithine; Arg(Me)(Pbf)-OH; Arg(Me)₂-OH (asymmetrical); Arg(Me)2-OH (symmetrical); Lys(ivDde)-OH; Lys(Me)2-OH.HCl; Lys(Me3)-OH chloride; Nω-nitro-D-arginine; and Nω-nitro-L-arginine.

[0171] Amino acid analogs include analogs of aspartic or glutamic acids. Examples of amino acid analogs of aspartic and glutamic acids include, but are not limited to, the following: α-methyl-D-aspartic acid; α-methyl-glutamic acid; α-methyl-L-aspartic acid; γ-methylene-glutamic acid; (N-γ-ethyl)-L-glutamine; [N-α-(4-aminobenzoyl)]-L-glutamic acid; 2,6-diaminopimelic acid; L-α-aminosuberic acid; D-2-aminoadipic acid; D-α-aminosuberic acid; α-aminopimelic acid; iminodiacetic acid; L-2-aminoadipic acid; threo-β-methyl-aspartic acid; γ-carboxy-D-glutamic acid γ,γ-di-t-butyl ester; γ-carboxy-L-glutamic acid γ,γ-di-t-butyl ester; Glu(OAll)-OH; L-Asu(OtBu)—OH; and pyroglutamic acid.

[0172] Amino acid analogs include analogs of cysteine and methionine. Examples of amino acid analogs of cysteine and methionine include, but are not limited to, Cys(farnesyl)-OH, Cys(farnesyl)-OMe, α-methyl-methionine, Cys(2-hydroxyethyl)-OH, Cys(3-aminopropyl)-OH, 2-amino-4-(ethylthio)butyric acid, buthionine, buthioninesulfoximine, ethionine, methionine methylsulfonium chloride, selenomethionine, cysteic acid, [2-(4-pyridyl)ethyl]-DL-penicillamine, [2-(4-pyridyl)ethyl]-L-cysteine, 4-methoxybenzyl-D-penicillamine, 4-methoxybenzyl-L-penicillamine, 4-methylbenzyl-D-penicillamine, 4-methylbenzyl-L-penicillamine, benzyl-D-cysteine, benzyl-L-cysteine, benzyl-DL-homocysteine, carbamoyl-L-cysteine, carboxyethyl-L-cysteine, carboxymethyl-L-cysteine, diphenylmethyl-L-cysteine, ethyl-L-cysteine, methyl-L-cysteine, t-butyl-D-cysteine, trityl-L-homocysteine, trityl-D-penicillamine, cystathionine, homocystine, L-homocystine, (2-aminoethyl)-L-cysteine, seleno-L-cystine, cystathionine, Cys(StBu)—OH, and acetamidomethyl-D-penicillamine.

[0173] Amino acid analogs include analogs of phenylalanine and tyrosine. Examples of amino acid analogs of phenylalanine and tyrosine include β-methyl-phenylalanine, β-hydroxyphenylalanine, α-methyl-3-methoxy-DL-phenylalanine, α-methyl-D-phenylalanine, α-methyl-L-phenylalanine, 1,2,3,4-tetrahydroisoquinoline-3-carboxylic acid, 2,4-dichloro-phenylalanine, 2-(trifluoromethyl)-D-phenylalanine, 2-(trifluoromethyl)-L-phenylalanine, 2-bromo-D-phenylalanine, 2-bromo-L-phenylalanine, 2-chloro-D-phenylalanine, 2-chloro-L-phenylalanine, 2-cyano-D-phenylalanine, 2-cyano-L-phenylalanine, 2-fluoro-D-phenylalanine, 2-fluoro-L-phenylalanine, 2-methyl-D-phenylalanine, 2-methyl-L-phenylalanine, 2-nitro-D-phenylalanine, 2-nitro-L-phenylalanine, 2;4;5-trihydroxy-phenylalanine, 3,4,5-trifluoro-D-phenylalanine, 3,4,5-trifluoro-L-phenylalanine, 3,4-dichloro-D-phenylalanine, 3,4-dichloro-L-phenylalanine, 3,4-difluoro-D-phenylalanine, 3,4-difluoro-L-phenylalanine, 3,4-dihydroxy-L-phenylalanine, 3,4-dimethoxy-L-phenylalanine, 3,5,3′-triiodo-L-thyronine, 3,5-diiodo-D-tyrosine, 3,5-diiodo-L-tyrosine, 3,5-diiodo-L-thyronine, 3-(trifluoromethyl)-D-phenylalanine, 3-(trifluoromethyl)-L-phenylalanine, 3-amino-L-tyrosine, 3-bromo-D-phenylalanine, 3-bromo-L-phenylalanine, 3-chloro-D-phenylalanine, 3-chloro-L-phenylalanine, 3-chloro-L-tyrosine, 3-cyano-D-phenylalanine, 3-cyano-L-phenylalanine, 3-fluoro-D-phenylalanine, 3-fluoro-L-phenylalanine, 3-fluoro-tyrosine, 3-iodo-D-phenylalanine, 3-iodo-L-phenylalanine, 3-iodo-L-tyrosine, 3-methoxy-L-tyrosine, 3-methyl-D-phenylalanine, 3-methyl-L-phenylalanine, 3-nitro-D-phenylalanine, 3-nitro-L-phenylalanine, 3-nitro-L-tyrosine, 4-(trifluoromethyl)-D-phenylalanine, 4-(trifluoromethyl)-L-phenylalanine, 4-amino-D-phenylalanine, 4-amino-L-phenylalanine, 4-benzoyl-D-phenylalanine, 4-benzoyl-L-phenylalanine, 4-bis(2-chloroethyl)amino-L-phenylalanine, 4-bromo-D-phenylalanine, 4-bromo-L-phenylalanine, 4-chloro-D-phenylalanine, 4-chloro-L-phenylalanine, 4-cyano-D-phenylalanine, 4-cyano-L-phenylalanine, 4-fluoro-D-phenylalanine, 4-fluoro-L-phenylalanine, 4-iodo-D-phenylalanine, 4-iodo-L-phenylalanine, homophenylalanine, thyroxine, 3,3-diphenylalanine, thyronine, ethyl-tyrosine, and methyl-tyrosine.

[0174] Amino acid analogs include analogs of proline. Examples of amino acid analogs of proline include, but are not limited to, 3,4-dehydro-proline, 4-fluoro-proline, cis-4-hydroxy-proline, thiazolidine-2-carboxylic acid, and trans-4-fluoro-proline.

[0175] Amino acid analogs include analogs of serine and threonine. Examples of amino acid analogs of serine and threonine include, but are not limited to, 3-amino-2-hydroxy-5-methylhexanoic acid, 2-amino-3-hydroxy-4-methylpentanoic acid, 2-amino-3-ethoxybutanoic acid, 2-amino-3-methoxybutanoic acid, 4-amino-3-hydroxy-6-methylheptanoic acid, 2-amino-3-benzyloxypropionic acid, 2-amino-3-benzyloxypropionic acid, 2-amino-3-ethoxypropionic acid, 4-amino-3-hydroxybutanoic acid, and α-methylserine.

[0176] Amino acid analogs include analogs of tryptophan. Examples of amino acid analogs of tryptophan include, but are not limited to, the following: α-methyl-tryptophan; β-(3-benzothienyl)-D-alanine; β-(3-benzothienyl)-L-alanine; 1-methyl-tryptophan; 4-methyl-tryptophan; 5-benzyloxy-tryptophan; 5-bromo-tryptophan; 5-chloro-tryptophan; 5-fluoro-tryptophan; 5-hydroxy-tryptophan; 5-hydroxy-L-tryptophan; 5-methoxy-tryptophan; 5-methoxy-L-tryptophan; 5-methyl-tryptophan; 6-bromo-tryptophan; 6-chloro-D-tryptophan; 6-chloro-tryptophan; 6-fluoro-tryptophan; 6-methyl-tryptophan; 7-benzyloxy-tryptophan; 7-bromo-tryptophan; 7-methyl-tryptophan; D-1,2,3,4-tetrahydro-norharman-3-carboxylic acid; 6-methoxy-1,2,3,4-tetrahydronorharman-1-carboxylic acid; 7-azatryptophan; L-1,2,3,4-tetrahydro-norharman-3-carboxylic acid; 5-methoxy-2-methyl-tryptophan; and 6-chloro-L-tryptophan.

[0177] In some embodiments, amino acid analogs are racemic. In some embodiments, the D isomer of the amino acid analog is used. In some embodiments, the L isomer of the amino acid analog is used. In other embodiments, the amino acid analog comprises chiral centers that are in the R or S configuration. In still other embodiments, the amino group(s) of a β-amino acid analog is substituted with a protecting group, e.g., tert-butyloxycarbonyl (BOC group), 9-fluorenylmethyloxycarbonyl (FMOC), tosyl, and the like. In yet other embodiments, the carboxylic acid functional group of a β-amino acid analog is protected, e.g., as its ester derivative. In some embodiments the salt of the amino acid analog is used.

[0178] A “non-essential” amino acid residue is a residue that can be altered from the wild-type sequence of a polypeptide without abolishing or substantially altering its essential biological or biochemical activity (e.g., receptor binding or activation). An “essential” amino acid residue is a residue that, when altered from the wild-type sequence of the polypeptide, results in abolishing or substantially abolishing the polypeptide's essential biological or biochemical activity.

[0179] A “conservative amino acid substitution” is one in which the amino acid residue is replaced with an amino acid residue having a similar side chain. Families of amino acid residues having similar side chains have been defined in the art. These families include amino acids with basic side chains (e.g., K, R, H), acidic side chains (e.g., D, E), uncharged polar side chains (e.g., G, N, Q, S, T, Y, C), nonpolar side chains (e.g., A, V, L, I, P, F, M, W), beta-branched side chains (e.g., T, V, I) and aromatic side chains (e.g., Y, F, W, H). Thus, a predicted nonessential amino acid residue in a polypeptide, for example, is replaced with another amino acid residue from the same side chain family. Other examples of acceptable substitutions are substitutions based on isosteric considerations (e.g. norleucine for methionine) or other properties (e.g. 2-thienylalanine for phenylalanine, or 6-Cl-tryptophan for tryptophan).

[0180] The term “capping group” refers to the chemical moiety occurring at either the carboxy or amino terminus of the polypeptide chain of the subject peptidomimetic macrocycle. The capping group of a carboxy terminus includes an unmodified carboxylic acid (ie —COOH) or a carboxylic acid with a substituent. For example, the carboxy terminus can be substituted with an amino group to yield a carboxamide at the C-terminus. Various substituents include but are not limited to primary and secondary amines, including pegylated secondary amines. Representative secondary amine capping groups for the C-terminus include:

[chemical structure]

[0181] The capping group of an amino terminus includes an unmodified amine (ie —NH₂) or an amine with a substituent. For example, the amino terminus can be substituted with an acyl group to yield a carboxamide at the N-terminus. Various substituents include but are not limited to substituted acyl groups, including C₁-C₆ carbonyls, C₇-C₃₀ carbonyls, and pegylated carbamates. Representative capping groups for the N-terminus include, but are not limited to, 4-FBzl (4-fluoro-benzyl) and the following:

[chemical structure]

[0182] The term “member” as used herein in conjunction with macrocycles or macrocycle-forming linkers refers to the atoms that form or can form the macrocycle, and excludes substituent or side chain atoms. By analogy, cyclodecane, 1,2-difluoro-decane and 1,3-dimethyl cyclodecane are all considered ten-membered macrocycles as the hydrogen or fluoro substituents or methyl side chains do not participate in forming the macrocycle.

[0183] The symbol [symbol] when used as part of a molecular structure refers to a single bond or a trans or cis double bond.

[0184] The term “amino acid side chain” refers to a moiety attached to the α-carbon (or another backbone atom) in an amino acid. For example, the amino acid side chain for alanine is methyl, the amino acid side chain for phenylalanine is phenylmethyl, the amino acid side chain for cysteine is thiomethyl, the amino acid side chain for aspartate is carboxymethyl, the amino acid side chain for tyrosine is 4-hydroxyphenylmethyl, etc. Other non-naturally occurring amino acid side chains are also included, for example, those that occur in nature (e.g., an amino acid metabolite) or those that are made synthetically (e.g., an α,α di-substituted amino acid).

[0185] The term “α,α di-substituted amino” acid refers to a molecule or moiety containing both an amino group and a carboxyl group bound to a carbon (the α-carbon) that is attached to two natural or non-natural amino acid side chains.

[0186] The term “polypeptide” encompasses two or more naturally or non-naturally-occurring amino acids joined by a covalent bond (e.g., an amide bond). Polypeptides as described herein include full length proteins (e.g., fully processed proteins) as well as shorter amino acid sequences (e.g., fragments of naturally-occurring proteins or synthetic polypeptide fragments).

[0187] The term “first C-terminal amino acid” refers to the amino acid which is closest to the C-terminus. The term “second C-terminal amino acid” refers to the amino acid attached at the N-terminus of the first C-terminal amino acid.

[0188] The term “macrocyclization reagent” or “macrocycle-forming reagent” as used herein refers to any reagent which can be used to prepare a peptidomimetic macrocycle by mediating the reaction between two reactive groups. Reactive groups can be, for example, an azide and alkyne, in which case macrocyclization reagents include, without limitation, Cu reagents such as reagents which provide a reactive Cu(I) species, such as CuBr, CuI or CuOTf, as well as Cu(II) salts such as Cu(CO₂CH₃)₂, CuSO₄, and CuCl₂ that can be converted in situ to an active Cu(I) reagent by the addition of a reducing agent such as ascorbic acid or sodium ascorbate. Macrocyclization reagents can additionally include, for example, Ru reagents known in the art such as Cp*RuCl(PPh₃)₂, [Cp*RuCl]₄ or other Ru reagents which can provide a reactive Ru(II) species. In other cases, the reactive groups are terminal olefins. In such embodiments, the macrocyclization reagents or macrocycle-forming reagents are metathesis catalysts including, but not limited to, stabilized, late transition metal carbene complex catalysts such as Group VIII transition metal carbene catalysts. For example, such catalysts are Ru and Os metal centers having a +2 oxidation state, an electron count of 16 and pentacoordinated. In other examples, catalysts have W or Mo centers. Various catalysts are disclosed in Grubbs et al., “Ring Closing Metathesis and Related Processes in Organic Synthesis” Acc. Chem. Res. 1995, 28, 446-452, U.S. Pat. No. 5,811,515; U.S. Pat. No. 7,932,397; U.S. Application No. 2011/0065915; U.S. Application No. 2011/0245477; Yu et al., “Synthesis of Macrocyclic Natural Products by Catalyst-Controlled Stereoselective Ring-Closing Metathesis,” Nature 2011, 479, 88; and Peryshkov et al., “Z-Selective Olefin Metathesis Reactions Promoted by Tungsten Oxo Alkylidene Complexes,” J. Am. Chem. Soc. 2011, 133, 20754. In yet other cases, the reactive groups are thiol groups. In such embodiments, the macrocyclization reagent is, for example, a linker functionalized with two thiol-reactive groups such as halogen groups.

[0189] The term “halo” or “halogen” refers to fluorine, chlorine, bromine or iodine or a radical thereof.

[0190] The term “alkyl” refers to a hydrocarbon chain that is a straight chain or branched chain, containing the indicated number of carbon atoms. For example, C₁-C₁₀ indicates that the group has from 1 to 10 (inclusive) carbon atoms in it. In the absence of any numerical designation, “alkyl” is a chain (straight or branched) having 1 to 20 (inclusive) carbon atoms in it.

[0191] The term “alkylene” refers to a divalent alkyl (i.e., —R—).

[0192] The term “alkenyl” refers to a hydrocarbon chain that is a straight chain or branched chain having one or more carbon-carbon double bonds. The alkenyl moiety contains the indicated number of carbon atoms. For example, C₂-C₁₀ indicates that the group has from 2 to 10 (inclusive) carbon atoms in it. The term “lower alkenyl” refers to a C₂-C₆ alkenyl chain. In the absence of any numerical designation, “alkenyl” is a chain (straight or branched) having 2 to 20 (inclusive) carbon atoms in it.

[0193] The term “alkynyl” refers to a hydrocarbon chain that is a straight chain or branched chain having one or more carbon-carbon triple bonds. The alkynyl moiety contains the indicated number of carbon atoms. For example, C₂-C₁₀ indicates that the group has from 2 to 10 (inclusive) carbon atoms in it. The term “lower alkynyl” refers to a C₂-C₆ alkynyl chain. In the absence of any numerical designation, “alkynyl” is a chain (straight or branched) having 2 to 20 (inclusive) carbon atoms in it.

[0194] The term “aryl” refers to a 6-carbon monocyclic or 10-carbon bicyclic aromatic ring system wherein 0, 1, 2, 3, or 4 atoms of each ring are substituted by a substituent. Examples of aryl groups include phenyl, naphthyl and the like. The term “arylalkoxy” refers to an alkoxy substituted with aryl.

[0195] “Arylalkyl” refers to an aryl group, as defined above, wherein one of the aryl group's hydrogen atoms has been replaced with a C₁-C₅ alkyl group, as defined above. Representative examples of an arylalkyl group include, but are not limited to, 2-methylphenyl, 3-methylphenyl, 4-methylphenyl, 2-ethylphenyl, 3-ethylphenyl, 4-ethylphenyl, 2-propylphenyl, 3-propylphenyl, 4-propylphenyl, 2-butylphenyl, 3-butylphenyl, 4-butylphenyl, 2-pentylphenyl, 3-pentylphenyl, 4-pentylphenyl, 2-isopropylphenyl, 3-isopropylphenyl, 4-isopropylphenyl, 2-isobutylphenyl, 3-isobutylphenyl, 4-isobutylphenyl, 2-sec-butylphenyl, 3-sec-butylphenyl, 4-sec-butylphenyl, 2-t-butylphenyl, 3-t-butylphenyl and 4-t-butylphenyl.

[0196] “Arylamido” refers to an aryl group, as defined above, wherein one of the aryl group's hydrogen atoms has been replaced with one or more —C(O)NH₂ groups. Representative examples of an arylamido group include 2-C(O)NH₂-phenyl, 3-C(O)NH₂-phenyl, 4-C(O)NH₂-phenyl, 2-C(O)NH₂-pyridyl, 3-C(O)NH₂-pyridyl, and 4-C(O)NH₂-pyridyl,

[0197] “Alkylheterocycle” refers to a C₁-C₅ alkyl group, as defined above, wherein one of the C₁-C₅ alkyl group's hydrogen atoms has been replaced with a heterocycle. Representative examples of an alkylheterocycle group include, but are not limited to, —CH₂CH₂-morpholine, —CH₂CH₂-piperidine, —CH₂CH₂CH₂-morpholine, and —CH₂CH₂CH₂-imidazole.

[0198] “Alkylamido” refers to a C₁-C₅ alkyl group, as defined above, wherein one of the C₁-C₅ alkyl group's hydrogen atoms has been replaced with a —C(O)NH₂ group. Representative examples of an alkylamido group include, but are not limited to, —CH₂—C(O)NH₂, —CH₂CH₂—C(O)NH₂, —CH₂CH₂CH₂C(O)NH₂, —CH₂CH₂CH₂CH₂C(O)NH₂, —CH₂CH₂CH₂CH₂CH₂C(O)NH₂, —CH₂CH(C(O)NH₂)CH₃, —CH₂CH(C(O)NH₂)CH₂CH₃, —CH(C(O)NH₂)CH₂CH₃, —C(CH₃)₂CH₂C(O)NH₂, —CH₂—CH₂—NH—C(O)—CH₃, —CH₂—CH₂—NH—C(O)—CH₃—CH₃, and —CH₂—CH₂—NH—C(O)—CH═CH₂.

[0199] “Alkanol” refers to a C₁-C₅ alkyl group, as defined above, wherein one of the C₁-C₅ alkyl group's hydrogen atoms has been replaced with a hydroxyl group. Representative examples of an alkanol group include, but are not limited to, —CH₂OH, —CH₂CH₂OH, —CH₂CH₂CH₂OH, —CH₂CH₂CH₂CH₂OH, —CH₂CH₂CH₂CH₂CH₂OH, —CH₂CH(OH)CH₃, —CH₂CH(OH)CH₂CH₃, —CH(OH)CH₃ and —C(CH₃)₂CH₂OH.

[0200] “Alkylcarboxy” refers to a C₁-C₅ alkyl group, as defined above, wherein one of the C₁-C₅ alkyl group's hydrogen atoms has been replaced with a—COOH group. Representative examples of an alkylcarboxy group include, but are not limited to, —CH₂COOH, —CH₂CH₂COOH, —CH₂CH₂CH₂COOH, —CH₂CH₂CH₂CH₂COOH, —CH₂CH(COOH)CH₃, —CH₂CH₂CH₂CH₂CH₂COOH, —CH₂CH(COOH)CH₂CH₃, —CH(COOH)CH₂CH₃ and —C(CH₃)₂CH₂COOH.

[0201] The term “cycloalkyl” as employed herein includes saturated and partially unsaturated cyclic hydrocarbon groups having 3 to 12 carbons, preferably 3 to 8 carbons, and more preferably 3 to 6 carbons, wherein the cycloalkyl group additionally is optionally substituted. Some cycloalkyl groups include, without limitation, cyclopropyl, cyclobutyl, cyclopentyl, cyclopentenyl, cyclohexyl, cyclohexenyl, cycloheptyl, and cyclooctyl.

[0202] The term “heteroaryl” refers to an aromatic 5-8 membered monocyclic, 8-12 membered bicyclic, or 11-14 membered tricyclic ring system having 1-3 heteroatoms if monocyclic, 1-6 heteroatoms if bicyclic, or 1-9 heteroatoms if tricyclic, said heteroatoms selected from O, N, or S (e.g., carbon atoms and 1-3, 1-6, or 1-9 heteroatoms of O, N, or S if monocyclic, bicyclic, or tricyclic, respectively), wherein 0, 1, 2, 3, or 4 atoms of each ring are substituted by a substituent. Examples of heteroaryl groups include pyridyl, furyl or furanyl, imidazolyl, benzimidazolyl, pyrimidinyl, thiophenyl or thienyl, quinolinyl, indolyl, thiazolyl, and the like.

[0203] The term “heteroarylalkyl” or the term “heteroaralkyl” refers to an alkyl substituted with a heteroaryl. The term “heteroarylalkoxy” refers to an alkoxy substituted with heteroaryl.

[0204] The term “heteroarylalkyl” or the term “heteroaralkyl” refers to an alkyl substituted with a heteroaryl. The term “heteroarylalkoxy” refers to an alkoxy substituted with heteroaryl.

[0205] The term “heterocyclyl” refers to a nonaromatic 5-8 membered monocyclic, 8-12 membered bicyclic, or 11-14 membered tricyclic ring system having 1-3 heteroatoms if monocyclic, 1-6 heteroatoms if bicyclic, or 1-9 heteroatoms if tricyclic, said heteroatoms selected from O, N, or S (e.g., carbon atoms and 1-3, 1-6, or 1-9 heteroatoms of O, N, or S if monocyclic, bicyclic, or tricyclic, respectively), wherein 0, 1, 2 or 3 atoms of each ring are substituted by a substituent. Examples of heterocyclyl groups include piperazinyl, pyrrolidinyl, dioxanyl, morpholinyl, tetrahydrofuranyl, and the like.

[0206] The term “substituent” refers to a group replacing a second atom or group such as a hydrogen atom on any molecule, compound or moiety. Suitable substituents include, without limitation, halo, hydroxy, mercapto, oxo, nitro, haloalkyl, alkyl, alkaryl, aryl, aralkyl, alkoxy, thioalkoxy, aryloxy, amino, alkoxycarbonyl, amido, carboxy, alkanesulfonyl, alkylcarbonyl, and cyano groups.

[0207] In some embodiments, the compounds disclosed herein contain one or more asymmetric centers and thus occur as racemates and racemic mixtures, single enantiomers, individual diastereomers and diastereomeric mixtures. All such isomeric forms of these compounds are included unless expressly provided otherwise. In some embodiments, the compounds disclosed herein are also represented in multiple tautomeric forms, in such instances, the compounds include all tautomeric forms of the compounds described herein (e.g., if alkylation of a ring system results in alkylation at multiple sites, the invention includes all such reaction products). All such isomeric forms of such compounds are included unless expressly provided otherwise. All crystal forms of the compounds described herein are included unless expressly provided otherwise.

[0208] As used herein, the terms “increase” and “decrease” mean, respectively, to cause a statistically significantly (i.e., p<0.1) increase or decrease of at least 5%.

[0209] As used herein, the recitation of a numerical range for a variable is intended to convey that the variable is equal to any of the values within that range. Thus, for a variable which is inherently discrete, the variable is equal to any integer value within the numerical range, including the end-points of the range. Similarly, for a variable which is inherently continuous, the variable is equal to any real value within the numerical range, including the end-points of the range. As an example, and without limitation, a variable which is described as having values between 0 and 2 takes the values 0, 1 or 2 if the variable is inherently discrete, and takes the values 0.0, 0.1, 0.01, 0.001, or any other real values≧0 and ≦2 if the variable is inherently continuous.

[0210] As used herein, unless specifically indicated otherwise, the word “or” is used in the inclusive sense of “and/or” and not the exclusive sense of “either/or.”

[0211] The term “on average” represents the mean value derived from performing at least three independent replicates for each data point.

[0212] The term “biological activity” encompasses structural and functional properties of a macrocycle. Biological activity is, for example, structural stability, alpha-helicity, affinity for a target, resistance to proteolytic degradation, cell penetrability, intracellular stability, in vivo stability, or any combination thereof.

[0213] The term “binding affinity” refers to the strength of a binding interaction, for example between a peptidomimetic macrocycle and a target. Binding affinity can be expressed, for example, as an equilibrium dissociation constant (“K_{D}”), which is expressed in units which are a measure of concentration (e.g. M, mM, μM, nM etc). Numerically, binding affinity and K_{D} values vary inversely, such that a lower binding affinity corresponds to a higher K_{D} value, while a higher binding affinity corresponds to a lower K_{D} value. Where high binding affinity is desirable, “improved” binding affinity refers to higher binding affinity and therefoere lower K_{D} values.

[0214] The term “in vitro efficacy” refers to the extent to which a test compound, such as a peptidomimetic macrocycle, produces a beneficial result in an in vitro test system or assay. In vitro efficacy can be measured, for example, as an “IC₅₀” or “EC₅₀” value, which represents the concentration of the test compound which produces 50% of the maximal effect in the test system.

[0215] The term “ratio of in vitro efficacies” or “in vitro efficacy ratio” refers to the ratio of IC₅₀ or EC₅₀ values from a first assay (the numerator) versus a second assay (the denominator). Consequently, an improved in vitro efficacy ratio for Assay 1 versus Assay 2 refers to a lower value for the ratio expressed as IC₅₀(Assay 1)/IC₅₀(Assay 2) or alternatively as EC₅₀(Assay 1)/EC₅₀(Assay 2). This concept can also be characterized as “improved selectivity” in Assay 1 versus Assay 2, which can be due either to a decrease in the IC₅₀ or EC₅₀ value for Target 1 or an increase in the value for the IC₅₀ or EC₅₀ value for Target 2.

[0216] The details of one or more particular embodiments of the invention are set forth in the accompanying drawings and the description below. Other features, objects, and advantages of the invention will be apparent from the description and drawings, and from the claims.

[0217] Peptidomimetic Macrocycles

[0218] In some embodiments, a peptidomimetic macrocycle has the Formula (I):

[chemical structure]

[0219] wherein:
[0220] each A, C, D, and E is independently an amino acid (including natural or non-natural amino acids, and amino acid analogs) and the terminal D and E independently optionally include a capping group;

[chemical structure]

[0221] B is an amino acid (including natural or non-natural amino acids, and amino acid analogs), [—NH-L₃-CO—], [—NH-L₃-SO₂—], or [—NH-L₃-];
[0222] R₁ and R₂ are independently —H, alkyl, alkenyl, alkynyl, arylalkyl, cycloalkyl, cycloalkylalkyl, heteroalkyl, or heterocycloalkyl, unsubstituted or substituted with halo-;
[0223] R₃ is hydrogen, alkyl, alkenyl, alkynyl, arylalkyl, heteroalkyl, cycloalkyl, heterocycloalkyl, cycloalkylalkyl, cycloaryl, or heterocycloaryl, optionally substituted with R₅;
[0224] L is a macrocycle-forming linker of the formula -L₁-L₂-;
[0225] L₁ and L₂ are independently alkylene, alkenylene, alkynylene, heteroalkylene, cycloalkylene, heterocycloalkylene, cycloarylene, heterocycloarylene, or [—R₄—K—R₄—]ₙ, each being optionally substituted with R₅;
[0226] each R₄ is alkylene, alkenylene, alkynylene, heteroalkylene, cycloalkylene, heterocycloalkylene, arylene, or heteroarylene;
[0227] each K is O, S, SO, SO₂, CO, CO₂, or CONR₃;
[0228] each R₅ is independently halogen, alkyl, —OR₆, —N(R₆)₂, —SR₆, —SOR₆, —SO₂R₆, —CO₂R₆, a fluorescent moiety, a radioisotope or a therapeutic agent;
[0229] each R₆ is independently —H, alkyl, alkenyl, alkynyl, arylalkyl, cycloalkylalkyl, heterocycloalkyl, a fluorescent moiety, a radioisotope or a therapeutic agent;
[0230] R₇ is —H, alkyl, alkenyl, alkynyl, arylalkyl, cycloalkyl, heteroalkyl, cycloalkylalkyl, heterocycloalkyl, cycloaryl, or heterocycloaryl, optionally substituted with R₅, or part of a cyclic structure with a D residue;
[0231] R₈ is —H, alkyl, alkenyl, alkynyl, arylalkyl, cycloalkyl, heteroalkyl, cycloalkylalkyl, heterocycloalkyl, cycloaryl, or heterocycloaryl, optionally substituted with R₅, or part of a cyclic structure with an E residue;
[0232] v and w are independently integers from 1-1000, for example 1-500, 1-200, 1-100, 1-50, 1-30, 1-20, or 1-10;
[0233] u is an integer from 1-10, for example 1-5, 1-3 or 1-2;
[0234] x, y and z are independently integers from 0-10, for example the sum of x+y+z is 2, 3, or 6; and
[0235] n is an integer from 1-5.

[0236] In some embodiments, v and w are integers between 1-30. In some embodiments, w is an integer from 3-1000, for example 3-500, 3-200, 3-100, 3-50, 3-30, 3-20, or 3-10. In some embodiments, the sum of x+y+z is 3 or 6. In some embodiments, the sum of x+y+z is 3. In other embodiments, the sum of x+y+z is 6.

[0237] In some embodiments, peptidomimetic macrocycles are also provided of the formula:

[chemical structure]

[0238] wherein:
[0239] each of Xaa₃, Xaa₅, Xaa₆, Xaa₇, Xaa₈, Xaa₉, and Xaa₁₀ is individually an amino acid, wherein at least three of Xaa₃, Xaa₅, Xaa₆, Xaa₇, Xaa₈, Xaa₉, and Xaa₁₀ are the same amino acid as the amino acid at the corresponding position of the sequence Phe₃-X₄—His₅-Tyr₆-Trp₇-Ala₈-Gln₉-Leu₁₀-X₁₁—Ser₁₂, where each X is an amino acid;
[0240] each D and E is independently an amino acid;
[0241] R₁ and R₂ are independently —H, alkyl, alkenyl, alkynyl, arylalkyl, cycloalkyl, cycloalkylalkyl, heteroalkyl, or heterocycloalkyl, unsubstituted or substituted with halo-; or at least one of R₁ and R₂ forms a macrocycle-forming linker L′ connected to the alpha position of one of said D or E amino acids;
[0242] each L or L′ is independently a macrocycle-forming linker of the formula -L₁-L₂-;
[0243] L₁ and L₂ are independently alkylene, alkenylene, alkynylene, heteroalkylene, cycloalkylene, heterocycloalkylene, cycloarylene, heterocycloarylene, or [—R₄—K—R₄—]ₙ, each being optionally substituted with R₅;
[0244] R₃ is hydrogen, alkyl, alkenyl, alkynyl, arylalkyl, heteroalkyl, cycloalkyl, heterocycloalkyl, cycloalkylalkyl, cycloaryl, or heterocycloaryl, optionally substituted with R₅;
[0245] each R₄ is alkylene, alkenylene, alkynylene, heteroalkylene, cycloalkylene, heterocycloalkylene, arylene, or heteroarylene;
[0246] each K is O, S, SO, SO₂, CO, CO₂, or CONR₃;
[0247] each R₅ is independently halogen, alkyl, —OR₆, —N(R₆)₂, —SR₆, —SOR₆, —SO₂R₆, —CO₂R₆, a fluorescent moiety, a radioisotope or a therapeutic agent;
[0248] each R₆ is independently —H, alkyl, alkenyl, alkynyl, arylalkyl, cycloalkylalkyl, heterocycloalkyl, a fluorescent moiety, a radioisotope or a therapeutic agent;
[0249] R₇ is —H, alkyl, alkenyl, alkynyl, arylalkyl, cycloalkyl, heteroalkyl, cycloalkylalkyl, heterocycloalkyl, cycloaryl, or heterocycloaryl, optionally substituted with R₅, or part of a cyclic structure with a D residue;
[0250] R₈ is —H, alkyl, alkenyl, alkynyl, arylalkyl, cycloalkyl, heteroalkyl, cycloalkylalkyl, heterocycloalkyl, cycloaryl, or heterocycloaryl, optionally substituted with R₅, or part of a cyclic structure with an E residue;
[0251] v is an integer from 1-1000, for example 1-500, 1-200, 1-100, 1-50, 1-30, 1-20 or 1-10;
[0252] w is an integer from 3-1000, for example 3-500, 3-200, 3-100, 3-50, 3-30, 3-20, or 3-10; and
[0253] n is an integer from 1-5.

[0254] In some embodiments, v and w are integers between 1-30. In some embodiments, w is an integer from 3-1000, for example 3-500, 3-200, 3-100, 3-50, 3-30, 3-20, or 3-10. In some embodiments, the sum of x+y+z is 3 or 6. In some embodiments, the sum of x+y+z is 3. In other embodiments, the sum of x+y+z is 6.

[0255] In some embodiments of any of the Formulas described herein, at least three of Xaa₃, Xaa₅, Xaa₆, Xaa₇, Xaa₈, Xaa₉, and Xaa₁₀ are the same amino acid as the amino acid at the corresponding position of the sequence Phe₃-X₄—His₅-Tyr₆-Trp₇-Ala₈-Gln₉-Leu₁₀-X₁₁—Ser₁₂. In other embodiments, at least four of Xaa₃, Xaa₅, Xaa₆, Xaa₇, Xaa₈, Xaa₉, and Xaa₁₀ are the same amino acid as the amino acid at the corresponding position of the sequence Phe₃-X₄—His₅-Tyr₆-Trp₇-Ala₈-Gln₉-Leu₁₀-X₁₁—Ser₁₂. In other embodiments, at least five of Xaa₃, Xaa₅, Xaa₆, Xaa₇, Xaa₈, Xaa₉, and Xaa₁₀ are the same amino acid as the amino acid at the corresponding position of the sequence Phe₃-X₄—His₅-Tyr₆-Trp₇-Ala₈-Gln₉-Leu₁₀-X₁₁—Ser₁₂. In other embodiments, at least six of Xaa₃, Xaa₅, Xaa₆, Xaa₇, Xaa₈, Xaa₉, and Xaa₁₀ are the same amino acid as the amino acid at the corresponding position of the sequence Phe₃-X₄—His₅-Tyr₆-Trp₇-Ala₈-Gln₉-Leu₁₀-X₁₁—Ser₁₂. In other embodiments, at least seven of Xaa₃, Xaa₅, Xaa₆, Xaa₇, Xaa₈, Xaa₉, and Xaa₁₀ are the same amino acid as the amino acid at the corresponding position of the sequence Phe₃-X₄—His₅-Tyr₆-Trp₇-Ala₈-Gln₉-Leu₁₀-X₁₁—Ser₁₂.

[0256] In some embodiments, a peptidomimetic macrocycle has the Formula:

[chemical structure]

[0257] wherein:
[0258] each of Xaa₃, Xaa₅, Xaa₆, Xaa₇, Xaa₈, Xaa₉, and Xaa₁₀ is individually an amino acid, wherein at least three of Xaa₃, Xaa₅, Xaa₆, Xaa₇, Xaa₈, Xaa₉, and Xaa₁₀ are the same amino acid as the amino acid at the corresponding position of the sequence Phe₃-X₄-Glu₅-Tyr₆-Trp₇-Ala₈-Gln₉-Leu₁₀/Cba₁₀-X₁₁-Ala₁₂, where each X is an amino acid;
[0259] each D is independently an amino acid;
[0260] each E is independently an amino acid, for example an amino acid selected from Ala (alanine), D-Ala (D-alanine), Aib (α-aminoisobutyric acid), Sar (N-methyl glycine), and Ser (serine);
[0261] R₁ and R₂ are independently —H, alkyl, alkenyl, alkynyl, arylalkyl, cycloalkyl, cycloalkylalkyl, heteroalkyl, or heterocycloalkyl, unsubstituted or substituted with halo-; or at least one of R₁ and R₂ forms a macrocycle-forming linker L′ connected to the alpha position of one of said D or E amino acids;
[0262] each L or L′ is independently a macrocycle-forming linker of the formula -L₁-L₂-;
[0263] L₁ and L₂ are independently alkylene, alkenylene, alkynylene, heteroalkylene, cycloalkylene, heterocycloalkylene, cycloarylene, heterocycloarylene, or [—R₄—K—R₄—]ₙ, each being optionally substituted with R₅;
[0264] R₃ is hydrogen, alkyl, alkenyl, alkynyl, arylalkyl, heteroalkyl, cycloalkyl, heterocycloalkyl, cycloalkylalkyl, cycloaryl, or heterocycloaryl, optionally substituted with R₅;
[0265] each R₄ is alkylene, alkenylene, alkynylene, heteroalkylene, cycloalkylene, heterocycloalkylene, arylene, or heteroarylene;
[0266] each K is O, S, SO, SO₂, CO, CO₂, or CONR₃;
[0267] each R₅ is independently halogen, alkyl, —OR₆, —N(R₆)₂, —SR₆, —SOR₆, —SO₂R₆, —CO₂R₆, a fluorescent moiety, a radioisotope or a therapeutic agent;
[0268] each R₆ is independently —H, alkyl, alkenyl, alkynyl, arylalkyl, cycloalkylalkyl, heterocycloalkyl, a fluorescent moiety, a radioisotope or a therapeutic agent;
[0269] R₇ is —H, alkyl, alkenyl, alkynyl, arylalkyl, cycloalkyl, heteroalkyl, cycloalkylalkyl, heterocycloalkyl, cycloaryl, or heterocycloaryl, optionally substituted with R₅, or part of a cyclic structure with a D residue;
[0270] R₈ is —H, alkyl, alkenyl, alkynyl, arylalkyl, cycloalkyl, heteroalkyl, cycloalkylalkyl, heterocycloalkyl, cycloaryl, or heterocycloaryl, optionally substituted with R₅, or part of a cyclic structure with an E residue;
[0271] v is an integer from 1-1000, for example 1-500, 1-200, 1-100, 1-50, 1-30, 1-20, or 1-10;
[0272] w is an integer from 3-1000, for example 3-500, 3-200, 3-100, 3-50, 3-30, 3-20, or 3-10; and
[0273] n is an integer from 1-5.

[0274] In some embodiments of the above Formula, at least three of Xaa₃, Xaa₅, Xaa₆, Xaa₇, Xaa₈, Xaa₉, and Xaa₁₀ are the same amino acid as the amino acid at the corresponding position of the sequence Phe₃-X₄-Glu₅-Tyr₆-Trp₇-Ala₈-Gln₉-Leu₁₀/Cba₁₀-X₁₁-Ala₁₂. In other embodiments of the above Formula, at least four of Xaa₃, Xaa₅, Xaa₆, Xaa₇, Xaa₈, Xaa₉, and Xaa₁₀ are the same amino acid as the amino acid at the corresponding position of the sequence Phe₃-X₄-Glu₅-Tyr₆-Trp₇-Ala₈-Gln₉-Leu₁₀/Cba₁₀-X₁₁-Ala₁₂. In other embodiments of the above Formula, at least five of Xaa₃, Xaa₅, Xaa₆, Xaa₇, Xaa₈, Xaa₉, and Xaa₁₀ are the same amino acid as the amino acid at the corresponding position of the sequence Phe₃-X₄-Glu₅-Tyr₆-Trp₇-Ala₈-Gln₉-Leu₁₀/Cba₁₀-X₁₁-Ala₁₂. In other embodiments of the above Formula, at least six of Xaa₃, Xaa₅, Xaa₆, Xaa₇, Xaa₈, Xaa₉, and Xaa₁₀ are the same amino acid as the amino acid at the corresponding position of the sequence Phe₃-X₄-Glu₅-Tyr₆-Trp₇-Ala₈-Gln₉-Leu₁₀/Cba₁₀-X₁₁-Ala₁₂. In other embodiments of the above Formula, at least seven of Xaa₃, Xaa₅, Xaa₆, Xaa₇, Xaa₈, Xaa₉, and Xaa₁₀ are the same amino acid as the amino acid at the corresponding position of the sequence Phe₃-X₄-Glu₅-Tyr₆-Trp₇-Ala₈-Gln₉-Leu₁₀/Cba₁₀-X₁₁-Ala₁₂.

[0275] In some embodiments, w is an integer from 3-10, for example 3-6,3-8, 6-8, or 6-10. In some embodiments, w is 3. In other embodiments, w is 6. In some embodiments, v is an integer from 1-10, for example 2-5. In some embodiments, v is 2.

[0276] In an embodiment of any of the Formulas described herein, L₁ and L₂, either alone or in combination, do not form a triazole or a thioether.

[0277] In one example, at least one of R₁ and R₂ is alkyl, unsubstituted or substituted with halo-. In another example, both R₁ and R₂ are independently alkyl, unsubstituted or substituted with halo-. In some embodiments, at least one of R₁ and R₂ is methyl. In other embodiments, R₁ and R₂ are methyl.

[0278] In some embodiments, x+y+z is at least 3. In other embodiments, x+y+z is 1, 2, 3, 4, 5, 6, 7, 8, 9 or 10. In some embodiments, the sum of x+y+z is 3 or 6. In some embodiments, the sum of x+y+z is 3. In other embodiments, the sum of x+y+z is 6. Each occurrence of A, B, C, D or E in a macrocycle or macrocycle precursor is independently selected. For example, a sequence represented by the formula [A]ₓ, when x is 3, encompasses embodiments where the amino acids are not identical, e.g. Gln-Asp-Ala as well as embodiments where the amino acids are identical, e.g. Gln-Gln-Gln. This applies for any value of x, y, or z in the indicated ranges. Similarly, when u is greater than 1, each compound can encompass peptidomimetic macrocycles which are the same or different. For example, a compound can comprise peptidomimetic macrocycles comprising different linker lengths or chemical compositions.

[0279] In some embodiments, the peptidomimetic macrocycle comprises a secondary structure which is an α-helix and R₈ is —H, allowing intrahelical hydrogen bonding. In some embodiments, at least one of A, B, C, D or E is an α,α-disubstituted amino acid. In one example, B is an α,α-disubstituted amino acid. For instance, at least one of A, B, C, D or E is 2-aminoisobutyric acid. In other embodiments, at least one of A, B, C, D or E is

[chemical structure]

[0280] In other embodiments, the length of the macrocycle-forming linker L as measured from a first Cα to a second Cα is selected to stabilize a desired secondary peptide structure, such as an α-helix formed by residues of the peptidomimetic macrocycle including, but not necessarily limited to, those between the first Cα to a second Cα.

[0281] In one embodiment, the peptidomimetic macrocycle of Formula (I) is:

[chemical structure]

[0282] wherein each R₁ and R₂ is independently —H, alkyl, alkenyl, alkynyl, arylalkyl, cycloalkyl, cycloalkylalkyl, heteroalkyl, or heterocycloalkyl, unsubstituted or substituted with halo-.

[0283] In related embodiments, the peptidomimetic macrocycle of Formula (I) is:

[chemical structure]

wherein each R₁′ and R₂′ is independently an amino acid.

[0284] In other embodiments, the peptidomimetic macrocycle of Formula (I) is a compound of any of the formulas shown below:

[chemical structure]

[chemical structure]

[chemical structure]

wherein “AA” represents any natural or non-natural amino acid side chain and “ [symbol] ” is [D]ᵥ, [E]_{w} as defined above, and n is an integer between 0 and 20, 50, 100, 200, 300, 400 or 500. In some embodiments, n is 0. In other embodiments, n is less than 50.

[0285] Exemplary embodiments of the macrocycle-forming linker L are shown below.

[chemical structure]

[0286] In other embodiments, D and/or E in the compound of Formula I are further modified in order to facilitate cellular uptake. In some embodiments, lipidating or PEGylating a peptidomimetic macrocycle facilitates cellular uptake, increases bioavailability, increases blood circulation, alters pharmacokinetics, decreases immunogenicity and/or decreases the needed frequency of administration.

[0287] In other embodiments, at least one of [D] and [E] in the compound of Formula I represents a moiety comprising an additional macrocycle-forming linker such that the peptidomimetic macrocycle comprises at least two macrocycle-forming linkers. In a specific embodiment, a peptidomimetic macrocycle comprises two macrocycle-forming linkers. In an embodiment, u is 2.

[0288] In some embodiments, any of the macrocycle-forming linkers described herein can be used in any combination with any of the sequences shown in Table 1, Table 1a, Table 1b, or Table 1c and also with any of the R-substituents indicated herein.

[0289] In some embodiments, the peptidomimetic macrocycle comprises at least one α-helix motif For example, A, B and/or C in the compound of Formula I include one or more α-helices. As a general matter, α-helices include between 3 and 4 amino acid residues per turn. In some embodiments, the α-helix of the peptidomimetic macrocycle includes 1 to 5 turns and, therefore, 3 to 20 amino acid residues. In specific embodiments, the α-helix includes 1 turn, 2 turns, 3 turns, 4 turns, or 5 turns. In some embodiments, the macrocycle-forming linker stabilizes an α-helix motif included within the peptidomimetic macrocycle. Thus, in some embodiments, the length of the macrocycle-forming linker L from a first Cα to a second Cα is selected to increase the stability of an α-helix. In some embodiments, the macrocycle-forming linker spans from 1 turn to 5 turns of the α-helix. In some embodiments, the macrocycle-forming linker spans approximately 1 turn, 2 turns, 3 turns, 4 turns, or 5 turns of the α-helix. In some embodiments, the length of the macrocycle-forming linker is approximately 5 Å to 9 Å per turn of the α-helix, or approximately 6 Å to 8 Å per turn of the α-helix. Where the macrocycle-forming linker spans approximately 1 turn of an α-helix, the length is equal to approximately 5 carbon-carbon bonds to 13 carbon-carbon bonds, approximately 7 carbon-carbon bonds to 11 carbon-carbon bonds, or approximately 9 carbon-carbon bonds. Where the macrocycle-forming linker spans approximately 2 turns of an α-helix, the length is equal to approximately 8 carbon-carbon bonds to 16 carbon-carbon bonds, approximately 10 carbon-carbon bonds to 14 carbon-carbon bonds, or approximately 12 carbon-carbon bonds. Where the macrocycle-forming linker spans approximately 3 turns of an α-helix, the length is equal to approximately 14 carbon-carbon bonds to 22 carbon-carbon bonds, approximately 16 carbon-carbon bonds to 20 carbon-carbon bonds, or approximately 18 carbon-carbon bonds. Where the macrocycle-forming linker spans approximately 4 turns of an α-helix, the length is equal to approximately 20 carbon-carbon bonds to 28 carbon-carbon bonds, approximately 22 carbon-carbon bonds to 26 carbon-carbon bonds, or approximately 24 carbon-carbon bonds. Where the macrocycle-forming linker spans approximately 5 turns of an α-helix, the length is equal to approximately 26 carbon-carbon bonds to 34 carbon-carbon bonds, approximately 28 carbon-carbon bonds to 32 carbon-carbon bonds, or approximately 30 carbon-carbon bonds. Where the macrocycle-forming linker spans approximately 1 turn of an α-helix, the linkage contains approximately 4 atoms to 12 atoms, approximately 6 atoms to 10 atoms, or approximately 8 atoms. Where the macrocycle-forming linker spans approximately 2 turns of the α-helix, the linkage contains approximately 7 atoms to 15 atoms, approximately 9 atoms to 13 atoms, or approximately 11 atoms. Where the macrocycle-forming linker spans approximately 3 turns of the α-helix, the linkage contains approximately 13 atoms to 21 atoms, approximately 15 atoms to 19 atoms, or approximately 17 atoms. Where the macrocycle-forming linker spans approximately 4 turns of the α-helix, the linkage contains approximately 19 atoms to 27 atoms, approximately 21 atoms to 25 atoms, or approximately 23 atoms. Where the macrocycle-forming linker spans approximately 5 turns of the α-helix, the linkage contains approximately 25 atoms to 33 atoms, approximately 27 atoms to 31 atoms, or approximately 29 atoms. Where the macrocycle-forming linker spans approximately 1 turn of the α-helix, the resulting macrocycle forms a ring containing approximately 17 members to 25 members, approximately 19 members to 23 members, or approximately 21 members. Where the macrocycle-forming linker spans approximately 2 turns of the α-helix, the resulting macrocycle forms a ring containing approximately 29 members to 37 members, approximately 31 members to 35 members, or approximately 33 members. Where the macrocycle-forming linker spans approximately 3 turns of the α-helix, the resulting macrocycle forms a ring containing approximately 44 members to 52 members, approximately 46 members to 50 members, or approximately 48 members. Where the macrocycle-forming linker spans approximately 4 turns of the α-helix, the resulting macrocycle forms a ring containing approximately 59 members to 67 members, approximately 61 members to 65 members, or approximately 63 members. Where the macrocycle-forming linker spans approximately 5 turns of the α-helix, the resulting macrocycle forms a ring containing approximately 74 members to 82 members, approximately 76 members to 80 members, or approximately 78 members.

[0290] In other embodiments, provided are peptidomimetic macrocycles of Formula (IV) or (IVa):

[chemical structure]

[0291] wherein:
[0292] each A, C, D, and E is independently a natural or non-natural amino acid, and the terminal D and E independently optionally include a capping group;
[0293] B is a natural or non-natural amino acid, amino acid analog,

[chemical structure]

### [—NH-L₃-CO—], [—NH-L₃-SO₂—], or [—NH-L₃-];

[0294] R₁ and R₂ are independently —H, alkyl, alkenyl, alkynyl, arylalkyl, cycloalkyl, cycloalkylalkyl, heteroalkyl, or heterocycloalkyl, unsubstituted or substituted with halo-; or at least one of R₁ and R₂ forms a macrocycle-forming linker L′ connected to the alpha position of one of said D or E amino acids;
[0295] R₃ is hydrogen, alkyl, alkenyl, alkynyl, arylalkyl, heteroalkyl, cycloalkyl, heterocycloalkyl, cycloalkylalkyl, cycloaryl, or heterocycloaryl, optionally substituted with R₅;
[0296] L is a macrocycle-forming linker of the formula -L₁-L₂-;
[0297] L₁ and L₂ are independently alkylene, alkenylene, alkynylene, heteroalkylene, cycloalkylene, heterocycloalkylene, cycloarylene, heterocycloarylene, or [—R₄—K—R₄—]ₙ, each being optionally substituted with R₅;
[0298] each R₄ is alkylene, alkenylene, alkynylene, heteroalkylene, cycloalkylene, heterocycloalkylene, arylene, or heteroarylene;
[0299] each K is O, S, SO, SO₂, CO, CO₂, or CONR₃;
[0300] each R₅ is independently halogen, alkyl, —OR₆, —N(R₆)₂, —SR₆, —SOR₆, —SO₂R₆, —CO₂R₆, a fluorescent moiety, a radioisotope or a therapeutic agent;
[0301] each R₆ is independently —H, alkyl, alkenyl, alkynyl, arylalkyl, cycloalkylalkyl, heterocycloalkyl, a fluorescent moiety, a radioisotope or a therapeutic agent;
[0302] R₇ is —H, alkyl, alkenyl, alkynyl, arylalkyl, cycloalkyl, heteroalkyl, cycloalkylalkyl, heterocycloalkyl, cycloaryl, or heterocycloaryl, optionally substituted with R₅;
[0303] V and w are independently integers from 1-1000;
[0304] u is an integer from 1-10;
[0305] x, y and z are independently integers from 0-10; and
[0306] n is an integer from 1-5.

[0307] In one example, L₁ and L₂, either alone or in combination, do not form a triazole or a thioether.

[0308] In one example, at least one of R₁ and R₂ is alkyl, unsubstituted or substituted with halo-. In another example, both R₁ and R₂ are independently alkyl, unsubstituted or substituted with halo-. In some embodiments, at least one of R₁ and R₂ is methyl. In other embodiments, R₁ and R₂ are methyl.

[0309] In some embodiments, x+y+z is at least 1. In other embodiments, x+y+z is at least 2. In other embodiments, x+y+z is 1, 2, 3, 4, 5, 6, 7, 8, 9 or 10. Each occurrence of A, B, C, D or E in a macrocycle or macrocycle precursor is independently selected. For example, a sequence represented by the formula [A]ₓ, when x is 3, encompasses embodiments where the amino acids are not identical, e.g. Gln-Asp-Ala as well as embodiments where the amino acids are identical, e.g. Gln-Gln-Gln. This applies for any value of x, y, or z in the indicated ranges.

[0310] In some embodiments, the peptidomimetic macrocycle comprises a secondary structure which is an α-helix and R₈ is —H, allowing intrahelical hydrogen bonding. In some embodiments, at least one of A, B, C, D or E is an α,α-disubstituted amino acid. In one example, B is an α,α-disubstituted amino acid. For instance, at least one of A, B, C, D or E is 2-aminoisobutyric acid. In other embodiments, at least one of A, B, C, D or E is

[chemical structure]

[0311] In other embodiments, the length of the macrocycle-forming linker L as measured from a first Cα to a second Cα is selected to stabilize a desired secondary peptide structure, such as an α-helix formed by residues of the peptidomimetic macrocycle including, but not necessarily limited to, those between the first Cα to a second Cα.

[0312] Exemplary embodiments of the macrocycle-forming linker -L₁-L₂- are shown below.

[chemical structure]

[0313] Unless otherwise stated, any compounds (including peptidomimetic macrocycles, macrocycle precursors, and other compositions) are also meant to encompass compounds which differ only in the presence of one or more isotopically enriched atoms. For example, compounds having the described structures except for the replacement of a hydrogen by a deuterium or tritium, or the replacement of a carbon by ¹³C— or ¹⁴C-enriched carbon are within the scope of this invention.

[0314] In some embodiments, the compounds disclosed herein can contain unnatural proportions of atomic isotopes at one or more of atoms that constitute such compounds. For example, the compounds can be radiolabeled with radioactive isotopes, such as for example tritium (³H), iodine-125 (¹²⁵I) or carbon-14 (¹⁴C). In other embodiments, one or more carbon atoms is replaced with a silicon atom. All isotopic variations of the compounds disclosed herein, whether radioactive or not, are contemplated herein.

[0315] Preparation of Peptidomimetic Macrocycles

[0316] Peptidomimetic macrocycles can be prepared by any of a variety of methods known in the art. For example, any of the residues indicated by “$” or “$r8” in Table 1, Table 1a, Table 1b, or Table 1c can be substituted with a residue capable of forming a crosslinker with a second residue in the same molecule or a precursor of such a residue.

[0317] Various methods to effect formation of peptidomimetic macrocycles are known in the art. For example, the preparation of peptidomimetic macrocycles of Formula I is described in Schafmeister et al., J. Am. Chem. Soc. 122:5891-5892 (2000); Schafineister & Verdine, J. Am. Chem. Soc. 122:5891 (2005); Walensky et al., Science 305:1466-1470 (2004); U.S. Pat. No. 7,192,713 and PCT application WO 2008/121767. The α,α-disubstituted amino acids and amino acid precursors disclosed in the cited references can be employed in synthesis of the peptidomimetic macrocycle precursor polypeptides. For example, the “55-olefin amino acid” is (S)-α-(2′-pentenyl) alanine and the “R8 olefin amino acid” is (R)-α-(2′-octenyl) alanine. Following incorporation of such amino acids into precursor polypeptides, the terminal olefins are reacted with a metathesis catalyst, leading to the formation of the peptidomimetic macrocycle. In various embodiments, the following amino acids can be employed in the synthesis of the peptidomimetic macrocycle:

[chemical structure]

[0318] In other embodiments, the peptidomimetic macrocyles are of Formula IV or IVa. Methods for the preparation of such macrocycles are described, for example, in U.S. Pat. No. 7,202,332.

[0319] Additional methods of forming peptidomimetic macrocycles which are envisioned as suitable include those disclosed by Mustapa, M. Firouz Mohd et al., J. Org. Chem. (2003), 68, pp. 8193-8198; Yang, Bin et al. Bioorg Med. Chem. Lett. (2004), 14, pp. 1403-1406; U.S. Pat. No. 5,364,851; U.S. Pat. No. 5,446,128; U.S. Pat. No. 5,824,483; U.S. Pat. No. 6,713,280; and U.S. Pat. No. 7,202,332. In such embodiments, aminoacid precursors are used containing an additional substituent R— at the alpha position. Such aminoacids are incorporated into the macrocycle precursor at the desired positions, which can be at the positions where the crosslinker is substituted or, alternatively, elsewhere in the sequence of the macrocycle precursor. Cyclization of the precursor is then effected according to the indicated method.

[0320] Assays

[0321] The properties of peptidomimetic macrocycles are assayed, for example, by using the methods described below. In some embodiments, a peptidomimetic macrocycle has improved biological properties relative to a corresponding polypeptide lacking the substituents described herein.

[0322] Assay to Determine α-helicity

[0323] In solution, the secondary structure of polypeptides with α-helical domains will reach a dynamic equilibrium between random coil structures and α-helical structures, often expressed as a “percent helicity”. Thus, for example, alpha-helical domains are predominantly random coils in solution, with α-helical content usually under 25%. Peptidomimetic macrocycles with optimized linkers, on the other hand, possess, for example, an alpha-helicity that is at least two-fold greater than that of a corresponding uncrosslinked polypeptide. In some embodiments, macrocycles will possess an alpha-helicity of greater than 50%. To assay the helicity of peptidomimetic macrocyles, the compounds are dissolved in an aqueous solution (e.g. 50 mM potassium phosphate solution at pH 7, or distilled H₂O, to concentrations of 25-50 μM). Circular dichroism (CD) spectra are obtained on a spectropolarimeter (e.g., Jasco J-710) using standard measurement parameters (e.g. temperature, 20° C.; wavelength, 190-260 nm; step resolution, 0.5 nm; speed, 20 nm/sec; accumulations, 10; response, 1 sec; bandwidth, 1 nm; path length, 0.1 cm). The α-helical content of each peptide is calculated by dividing the mean residue ellipticity (e.g. [Φ]222obs) by the reported value for a model helical decapeptide (Yang et al. (1986), Methods Enzymol. 130:208)).

[0324] Assay to Determine Melting Temperature (Tm).

[0325] A peptidomimetic macrocycle comprising a secondary structure such as an α-helix exhibits, for example, a higher melting temperature than a corresponding uncrosslinked polypeptide. Typically peptidomimetic macrocycles exhibit Tm of >60° C. representing a highly stable structure in aqueous solutions. To assay the effect of macrocycle formation on melting temperature, peptidomimetic macrocycles or unmodified peptides are dissolved in distilled H₂O (e.g. at a final concentration of 50 μM) and the Tm is determined by measuring the change in ellipticity over a temperature range (e.g. 4 to 95° C.) on a spectropolarimeter (e.g., Jasco J-710) using standard parameters (e.g. wavelength 222 nm; step resolution, 0.5 nm; speed, 20 nm/sec; accumulations, 10; response, 1 sec; bandwidth, 1 nm; temperature increase rate: 1° C./min; path length, 0.1 cm).

[0326] Protease Resistance Assay.

[0327] The amide bond of the peptide backbone is susceptible to hydrolysis by proteases, thereby rendering peptidic compounds vulnerable to rapid degradation in vivo. Peptide helix formation, however, typically buries the amide backbone and therefore can shield it from proteolytic cleavage. The peptidomimetic macrocycles can be subjected to in vitro trypsin proteolysis to assess for any change in degradation rate compared to a corresponding uncrosslinked polypeptide. For example, the peptidomimetic macrocycle and a corresponding uncrosslinked polypeptide are incubated with trypsin agarose and the reactions quenched at various time points by centrifugation and subsequent HPLC injection to quantitate the residual substrate by ultraviolet absorption at 280 nm Briefly, the peptidomimetic macrocycle and peptidomimetic precursor (5 mcg) are incubated with trypsin agarose (Pierce) (S/E ˜125) for 0, 10, 20, 90, and 180 minutes. Reactions are quenched by tabletop centrifugation at high speed; remaining substrate in the isolated supernatant is quantified by HPLC-based peak detection at 280 nm. The proteolytic reaction displays first order kinetics and the rate constant, k, is determined from a plot of ln[S] versus time (k=−1× slope).

[0328] Ex Vivo Stability Assay.

[0329] Peptidomimetic macrocycles with optimized linkers possess, for example, an ex vivo half-life that is at least two-fold greater than that of a corresponding uncrosslinked polypeptide, and possess an ex vivo half-life of 12 hours or more. For ex vivo serum stability studies, a variety of assays can be used. For example, a peptidomimetic macrocycle and a corresponding uncrosslinked polypeptide (2 mcg) are incubated with fresh mouse, rat and/or human serum (2 mL) at 37° C. for 0, 1, 2, 4, 8, and 24 hours. To determine the level of intact compound, the following procedure can be used: The samples are extracted by transferring 100 μl of sera to 2 ml centrifuge tubes followed by the addition of 10 μL of 50% formic acid and 500 μL acetonitrile and centrifugation at 14,000 RPM for 10 min at 4±2° C. The supernatants are then transferred to fresh 2 ml tubes and evaporated on Turbovap under N₂<10 psi, 37° C. The samples are reconstituted in 100 μL of 50:50 acetonitrile:water and submitted to LC-MS/MS analysis.

[0330] In vitro Binding Assays.

[0331] To assess the binding and affinity of peptidomimetic macrocycles and peptidomimetic precursors to acceptor proteins, a fluorescence polarization assay (FPA) issued, for example. The FPA technique measures the molecular orientation and mobility using polarized light and fluorescent tracer. When excited with polarized light, fluorescent tracers (e.g., FITC) attached to molecules with high apparent molecular weights (e.g. FITC-labeled peptides bound to a large protein) emit higher levels of polarized fluorescence due to their slower rates of rotation as compared to fluorescent tracers attached to smaller molecules (e.g. FITC-labeled peptides that are free in solution).

[0332] For example, fluoresceinated peptidomimetic macrocycles (25 nM) are incubated with the acceptor protein (25-1000 nM) in binding buffer (140 mM NaCl, 50 mM Tris-HCL, pH 7.4) for 30 minutes at room temperature. Binding activity is measured, for example, by fluorescence polarization on a luminescence spectrophotometer (e.g. Perkin-Elmer LS50B). Kd values can be determined by nonlinear regression analysis using, for example, Graphpad Prism software (GraphPad Software, Inc., San Diego, Calif.). A peptidomimetic macrocycle shows, In some embodiments, similar or lower Kd than a corresponding uncrosslinked polypeptide.

[0333] In Vitro Displacement Assays to Characterize Antagonists of Peptide-Protein Interactions.

[0334] To assess the binding and affinity of compounds that antagonize the interaction between a peptide and an acceptor protein, a fluorescence polarization assay (FPA) utilizing a fluoresceinated peptidomimetic macrocycle derived from a peptidomimetic precursor sequence is used, for example. The FPA technique measures the molecular orientation and mobility using polarized light and fluorescent tracer. When excited with polarized light, fluorescent tracers (e.g., FITC) attached to molecules with high apparent molecular weights (e.g. FITC-labeled peptides bound to a large protein) emit higher levels of polarized fluorescence due to their slower rates of rotation as compared to fluorescent tracers attached to smaller molecules (e.g. FITC-labeled peptides that are free in solution). A compound that antagonizes the interaction between the fluoresceinated peptidomimetic macrocycle and an acceptor protein will be detected in a competitive binding FPA experiment.

[0335] For example, putative antagonist compounds (1 nM to 1 mM) and a fluoresceinated peptidomimetic macrocycle (25 nM) are incubated with the acceptor protein (50 nM) in binding buffer (140 mM NaCl, 50 mM Tris-HCL, pH 7.4) for 30 minutes at room temperature. Antagonist binding activity is measured, for example, by fluorescence polarization on a luminescence spectrophotometer (e.g. Perkin-Elmer LS50B). Kd values can be determined by nonlinear regression analysis using, for example, Graphpad Prism software (GraphPad Software, Inc., San Diego, Calif.).

[0336] Any class of molecule, such as small organic molecules, peptides, oligonucleotides or proteins can be examined as putative antagonists in this assay.

[0337] Assay for Protein-Ligand Binding by Affinity Selection-Mass Spectrometry

[0338] To assess the binding and affinity of test compounds for proteins, an affinity-selection mass spectrometry assay is used, for example. Protein-ligand binding experiments are conducted according to the following representative procedure outlined for a system-wide control experiment using 1 μM peptidomimetic macrocycle plus 5 μM hMDM2. A 1 μL DMSO aliquot of a 40 μM stock solution of peptidomimetic macrocycle is dissolved in 19 μL of PBS (Phosphate-buffered saline: 50 mM, pH 7.5 Phosphate buffer containing 150 mM NaCl). The resulting solution is mixed by repeated pipetting and clarified by centrifugation at 10 000 g for 10 min. To a 4 μL aliquot of the resulting supernatant is added 4 μL of 10 μM hMDM2 in PBS. Each 8.0 μL experimental sample thus contains 40 pmol (1.5 μL) of protein at 5.0 μM concentration in PBS plus 1 μM peptidomimetic macrocycle and 2.5% DMSO. Duplicate samples thus prepared for each concentration point are incubated for 60 min at room temperature, and then chilled to 4° C. prior to size-exclusion chromatography-LC-MS analysis of 5.0 μL injections. Samples containing a target protein, protein-ligand complexes, and unbound compounds are injected onto an SEC column, where the complexes are separated from non-binding component by a rapid SEC step. The SEC column eluate is monitored using UV detectors to confirm that the early-eluting protein fraction, which elutes in the void volume of the SEC column, is well resolved from unbound components that are retained on the column. After the peak containing the protein and protein-ligand complexes elutes from the primary UV detector, it enters a sample loop where it is excised from the flow stream of the SEC stage and transferred directly to the LC-MS via a valving mechanism. The (M+3H)³⁺ ion of the peptidomimetic macrocycle is observed by ESI-MS at the expected m/z, confirming the detection of the protein-ligand complex.

[0339] Assay for Protein-Ligand Kd Titration Experiments.

[0340] To assess the binding and affinity of test compounds for proteins, a protein-ligand Kd titration experiment is performed, for example. Protein-ligand K_{d} titrations experiments are conducted as follows: 2 μL DMSO aliquots of a serially diluted stock solution of titrant peptidomimetic macrocycle (5, 2.5, . . . , 0.098 mM) are prepared then dissolved in 38 μL of PBS. The resulting solutions are mixed by repeated pipetting and clarified by centrifugation at 10 000 g for 10 min. To 4.0 μL aliquots of the resulting supernatants is added 4.0 μL of 10 μM hMDM2 in PBS. Each 8.0 μL experimental sample thus contains 40 pmol (1.5 μL) of protein at 5.0 μM concentration in PBS, varying concentrations (125, 62.5, . . . , 0.24 μM) of the titrant peptide, and 2.5% DMSO. Duplicate samples thus prepared for each concentration point are incubated at room temperature for 30 min, then chilled to 4° C. prior to SEC-LC-MS analysis of 2.0 μL injections. The (M+H)¹⁺, (M+2H)²⁺, (M+3H)³⁺, and/or (M+Na)¹⁺ ion is observed by ESI-MS; extracted ion chromatograms are quantified, then fit to equations to derive the binding affinity K_{d} as described in “A General Technique to Rank Protein-Ligand Binding Affinities and Determine Allosteric vs. Direct Binding Site Competition in Compound Mixtures.” Annis, D. A.; Nazef, N.; Chuang, C. C.; Scott, M. P.; Nash, H. M. J. Am. Chem. Soc. 2004, 126, 15495-15503; also in “ALIS: An Affinity Selection-Mass Spectrometry System for the Discovery and Characterization of Protein-Ligand Interactions” D. A. Annis, C.-C. Chuang, and N. Nazef. In Mass Spectrometry in Medicinal Chemistry. Edited by Wanner K, Höfner G: Wiley-VCH; 2007:121-184. Mannhold R, Kubinyi H, Folkers G (Series Editors): Methods and Principles in Medicinal Chemistry.

[0341] Assay for Competitive Binding Experiments by Affinity Selection-Mass Spectrometry

[0342] To determine the ability of test compounds to bind competitively to proteins, an affinity selection mass spectrometry assay is performed, for example. A mixture of ligands at 40 μM per component is prepared by combining 2 μL aliquots of 400 μM stocks of each of the three compounds with 14 μL of DMSO. Then, 1 μL aliquots of this 40 μM per component mixture are combined with 1 μL DMSO aliquots of a serially diluted stock solution of titrant peptidomimetic macrocycle (10, 5, 2.5, . . . , 0.078 mM). These 2 μL samples are dissolved in 38 μL of PBS. The resulting solutions were mixed by repeated pipetting and clarified by centrifugation at 10 000 g for 10 min. To 4.0 μL aliquots of the resulting supernatants is added 4.0 μL of 10 μM hMDM2 protein in PBS. Each 8.0 μL experimental sample thus contains 40 pmol (1.5 μL) of protein at 5.0 μM concentration in PBS plus 0.5 μM ligand, 2.5% DMSO, and varying concentrations (125, 62.5, . . . , 0.98 μM) of the titrant peptidomimetic macrocycle. Duplicate samples thus prepared for each concentration point are incubated at room temperature for 60 min, then chilled to 4° C. prior to SEC-LC-MS analysis of 2.0 μL injections. Additional details on these and other methods are provided in “A General Technique to Rank Protein-Ligand Binding Affinities and Determine Allosteric vs. Direct Binding Site Competition in Compound Mixtures.” Annis, D. A.; Nazef, N.; Chuang, C. C.; Scott, M. P.; Nash, H. M. J. Am. Chem. Soc. 2004, 126, 15495-15503; also in “ALIS: An Affinity Selection-Mass Spectrometry System for the Discovery and Characterization of Protein-Ligand Interactions” D. A. Annis, C.-C. Chuang, and N. Nazef. In Mass Spectrometry in Medicinal Chemistry. Edited by Wanner K, Höfner G: Wiley-VCH; 2007:121-184. Mannhold R, Kubinyi H, Folkers G (Series Editors): Methods and Principles in Medicinal Chemistry.

[0343] Binding Assays in Intact Cells.

[0344] It is possible to measure binding of peptides or peptidomimetic macrocycles to their natural acceptors in intact cells by immunoprecipitation experiments. For example, intact cells are incubated with fluoresceinated (FITC-labeled) compounds for 4 hrs in the absence of serum, followed by serum replacement and further incubation that ranges from 4-18 hrs. Cells are then pelleted and incubated in lysis buffer (50 mM Tris [pH 7.6], 150 mM NaCl, 1% CHAPS and protease inhibitor cocktail) for 10 minutes at 4° C. Extracts are centrifuged at 14,000 rpm for 15 minutes and supernatants collected and incubated with 10 μl goat anti-FITC antibody for 2 hrs, rotating at 4° C. followed by further 2 hrs incubation at 4° C. with protein A/G Sepharose (50 μl of 50% bead slurry). After quick centrifugation, the pellets are washed in lysis buffer containing increasing salt concentration (e.g., 150, 300, 500 mM). The beads are then re-equilibrated at 150 mM NaCl before addition of SDS-containing sample buffer and boiling. After centrifugation, the supernatants are optionally electrophoresed using 4%-12% gradient Bis-Tris gels followed by transfer into Immobilon-P membranes. After blocking, blots are optionally incubated with an antibody that detects FITC and also with one or more antibodies that detect proteins that bind to the peptidomimetic macrocycle.

[0345] Cellular Penetrability Assays.

[0346] A peptidomimetic macrocycle is, for example, more cell penetrable compared to a corresponding uncrosslinked macrocycle. Peptidomimetic macrocycles with optimized linkers possess, for example, cell penetrability that is at least two-fold greater than a corresponding uncrosslinked macrocycle, and often 20% or more of the applied peptidomimetic macrocycle will be observed to have penetrated the cell after 4 hours. To measure the cell penetrability of peptidomimetic macrocycles and corresponding uncrosslinked macrocycle, intact cells are incubated with fluorescently-labeled (e.g. fluoresceinated) peptidomimetic macrocycles or corresponding uncrosslinked macrocycle (10 μM) for 4 hrs in serum free media at 37° C., washed twice with media and incubated with trypsin (0.25%) for 10 min at 37° C. The cells are washed again and resuspended in PBS. Cellular fluorescence is analyzed, for example, by using either a FACSCalibur flow cytometer or Cellomics' KineticScan® HCS Reader.

[0347] Cellular Efficacy Assays.

[0348] The efficacy of certain peptidomimetic macrocycles is determined, for example, in cell-based killing assays using a variety of tumorigenic and non-tumorigenic cell lines and primary cells derived from human or mouse cell populations. Cell viability is monitored, for example, over 24-96 hrs of incubation with peptidomimetic macrocycles (0.5 to 50 μM) to identify those that kill at EC₅₀<10 μM. Several standard assays that measure cell viability are commercially available and are optionally used to assess the efficacy of the peptidomimetic macrocycles. In addition, assays that measure Annexin V and caspase activation are optionally used to assess whether the peptidomimetic macrocycles kill cells by activating the apoptotic machinery. For example, the Cell Titer-glo assay is used which determines cell viability as a function of intracellular ATP concentration.

[0349] In Vivo Stability Assay.

[0350] To investigate the in vivo stability of the peptidomimetic macrocycles, the compounds are, for example, administered to mice and/or rats by IV, IP, PO or inhalation routes at concentrations ranging from 0.1 to 50 mg/kg and blood specimens withdrawn at 0′, 5′, 15′, 30′, 1 hr, 4 hrs, 8 hrs and 24 hours post-injection. Levels of intact compound in 25 μL of fresh serum are then measured by LC-MS/MS as above.

[0351] In vivo Efficacy in Animal Models.

[0352] To determine the anti-oncogenic activity of peptidomimetic macrocycles in vivo, the compounds are, for example, given alone (IP, IV, PO, by inhalation or nasal routes) or in combination with sub-optimal doses of relevant chemotherapy (e.g., cyclophosphamide, doxorubicin, etoposide). In one example, 5×10⁶ RS4;11 cells (established from the bone marrow of a patient with acute lymphoblastic leukemia) that stably express luciferase are injected by tail vein in NOD-SCID mice 3 hrs after they have been subjected to total body irradiation. If left untreated, this form of leukemia is fatal in 3 weeks in this model. The leukemia is readily monitored, for example, by injecting the mice with D-luciferin (60 mg/kg) and imaging the anesthetized animals (e.g., Xenogen In Vivo Imaging System, Caliper Life Sciences, Hopkinton, Mass.). Total body bioluminescence is quantified by integration of photonic flux (photons/sec) by Living Image Software (Caliper Life Sciences, Hopkinton, Mass.). Peptidomimetic macrocycles alone or in combination with sub-optimal doses of relevant chemotherapeutics agents are, for example, administered to leukemic mice (10 days after injection/day 1 of experiment, in bioluminescence range of 14-16) by tail vein or IP routes at doses ranging from 0.1 mg/kg to 50 mg/kg for 7 to 21 days. Optionally, the mice are imaged throughout the experiment every other day and survival monitored daily for the duration of the experiment. Expired mice are optionally subjected to necropsy at the end of the experiment. Another animal model is implantation into NOD-SCID mice of DoHH2, a cell line derived from human follicular lymphoma, that stably expresses luciferase. These in vivo tests optionally generate preliminary pharmacokinetic, pharmacodynamic and toxicology data.

[0353] Clinical Trials.

[0354] To determine the suitability of the peptidomimetic macrocycles for treatment of humans, clinical trials are performed. For example, patients diagnosed with cancer and in need of treatment can be selected and separated in treatment and one or more control groups, wherein the treatment group is administered a peptidomimetic macrocycle, while the control groups receive a placebo or a known anti-cancer drug. The treatment safety and efficacy of the peptidomimetic macrocycles can thus be evaluated by performing comparisons of the patient groups with respect to factors such as survival and quality-of-life. In this example, the patient group treated with a peptidomimetic macrocyle can show improved long-term survival compared to a patient control group treated with a placebo.

[0355] Pharmaceutical Compositions and Routes of Administration

[0356] Pharmaceutical compositions disclosed herein include peptidomimetic macrocycles and pharmaceutically acceptable derivatives or prodrugs thereof. A “pharmaceutically acceptable derivative” means any pharmaceutically acceptable salt, ester, salt of an ester, pro-drug or other derivative of a compound disclosed herein which, upon administration to a recipient, is capable of providing (directly or indirectly) a compound disclosed herein. Particularly favored pharmaceutically acceptable derivatives are those that increase the bioavailability of the compounds when administered to a mammal (e.g., by increasing absorption into the blood of an orally administered compound) or which increases delivery of the active compound to a biological compartment (e.g., the brain or lymphatic system) relative to the parent species. Some pharmaceutically acceptable derivatives include a chemical group which increases aqueous solubility or active transport across the gastrointestinal mucosa.

[0357] In some embodiments, peptidomimetic macrocycles are modified by covalently or non-covalently joining appropriate functional groups to enhance selective biological properties. Such modifications include those which increase biological penetration into a given biological compartment (e.g., blood, lymphatic system, central nervous system), increase oral availability, increase solubility to allow administration by injection, alter metabolism, and alter rate of excretion.

[0358] Pharmaceutically acceptable salts of the compounds disclosed herein include those derived from pharmaceutically acceptable inorganic and organic acids and bases. Examples of suitable acid salts include acetate, adipate, benzoate, benzenesulfonate, butyrate, citrate, digluconate, dodecylsulfate, formate, fumarate, glycolate, hemisulfate, heptanoate, hexanoate, hydrochloride, hydrobromide, hydroiodide, lactate, maleate, malonate, methanesulfonate, 2-naphthalenesulfonate, nicotinate, nitrate, palmoate, phosphate, picrate, pivalate, propionate, salicylate, succinate, sulfate, tartrate, tosylate and undecanoate. Salts derived from appropriate bases include alkali metal (e.g., sodium), alkaline earth metal (e.g., magnesium), ammonium and N-(alkyl)₄⁺ salts.

[0359] For preparing pharmaceutical compositions from the compounds disclosed herein, pharmaceutically acceptable carriers include either solid or liquid carriers. Solid form preparations include powders, tablets, pills, capsules, cachets, suppositories, and dispersible granules. A solid carrier can be one or more substances, which also acts as diluents, flavoring agents, binders, preservatives, tablet disintegrating agents, or an encapsulating material. Details on techniques for formulation and administration are well described in the scientific and patent literature, see, e.g., the latest edition of Remington's Pharmaceutical Sciences, Maack Publishing Co, Easton Pa.

[0360] In powders, the carrier is a finely divided solid, which is in a mixture with the finely divided active component. In tablets, the active component is mixed with the carrier having the necessary binding properties in suitable proportions and compacted in the shape and size desired.

[0361] Suitable solid excipients are carbohydrate or protein fillers include, but are not limited to sugars, including lactose, sucrose, mannitol, or sorbitol; starch from corn, wheat, rice, potato, or other plants; cellulose such as methyl cellulose, hydroxypropylmethyl-cellulose, or sodium carboxymethylcellulose; and gums including arabic and tragacanth; as well as proteins such as gelatin and collagen. If desired, disintegrating or solubilizing agents are added, such as the cross-linked polyvinyl pyrrolidone, agar, alginic acid, or a salt thereof, such as sodium alginate.

[0362] Liquid form preparations include solutions, suspensions, and emulsions, for example, water or water/propylene glycol solutions. For parenteral injection, liquid preparations can be formulated in solution in aqueous polyethylene glycol solution.

[0363] The pharmaceutical preparation can be in unit dosage form. In such form the preparation is subdivided into unit doses containing appropriate quantities of the active component. The unit dosage form can be a packaged preparation, the package containing discrete quantities of preparation, such as packeted tablets, capsules, and powders in vials or ampoules. Also, the unit dosage form can be a capsule, tablet, cachet, or lozenge itself, or it can be the appropriate number of any of these in packaged form.

[0364] When one or more compositions disclosed herein comprise a combination of a peptidomimetic macrocycle and one or more additional therapeutic or prophylactic agents, both the compound and the additional agent should be present at dosage levels of between about Ito 100%, and more preferably between about 5 to 95% of the dosage normally administered in a monotherapy regimen. In some embodiments, the additional agents are administered separately, as part of a multiple dose regimen, from one or more compounds disclosed herein. Alternatively, those agents are part of a single dosage form, mixed together with the compounds disclosed herein in a single composition.

[0365] Methods of Use

[0366] In one aspect, provided herein are novel peptidomimetic macrocycles that are useful in competitive binding assays to identify agents which bind to the natural ligand(s) of the proteins or peptides upon which the peptidomimetic macrocycles are modeled. For example, in the p53/MDMX system, labeled peptidomimetic macrocycles based on p53 can be used in a MDMX binding assay along with small molecules that competitively bind to MDMX. Competitive binding studies allow for rapid in vitro evaluation and determination of drug candidates specific for the p53/MDMX system. Such binding studies can be performed with any of the peptidomimetic macrocycles disclosed herein and their binding partners.

[0367] Further provided are methods for the generation of antibodies against the peptidomimetic macrocycles. In some embodiments, these antibodies specifically bind both the peptidomimetic macrocycle and the precursor peptides, such as p53, to which the peptidomimetic macrocycles are related. Such antibodies, for example, disrupt the native protein-protein interaction, for example, binding between p53 and MDMX.

[0368] In other aspects, provided herein are both prophylactic and therapeutic methods of treating a subject at risk of (or susceptible to) a disorder or having a disorder associated with aberrant (e.g., insufficient or excessive) expression or activity of the molecules including p53, MDM2 or MDMX.

[0369] In another embodiment, a disorder is caused, at least in part, by an abnormal level of p53 or MDM2 or MDMX, (e.g., over or under expression), or by the presence of p53 or MDM2 or MDMX exhibiting abnormal activity. As such, the reduction in the level and/or activity of p53 or MDM2 or MDMX, or the enhancement of the level and/or activity of p53 or MDM2 or MDMX, by peptidomimetic macrocycles derived from p53, is used, for example, to ameliorate or reduce the adverse symptoms of the disorder.

[0370] In another aspect, provided herein are methods for treating or preventing a disease including hyperproliferative disease and inflammatory disorder by interfering with the interaction or binding between binding partners, for example, between p53 and MDM2 or p53 and MDMX. These methods comprise administering an effective amount of a compound to a warm blooded animal, including a human. In some embodiments, the administration of one or more compounds disclosed herein induces cell growth arrest or apoptosis.

[0371] As used herein, the term “treatment” is defined as the application or administration of a therapeutic agent to a patient, or application or administration of a therapeutic agent to an isolated tissue or cell line from a patient, who has a disease, a symptom of disease or a predisposition toward a disease, with the purpose to cure, heal, alleviate, relieve, alter, remedy, ameliorate, improve or affect the disease, the symptoms of disease or the predisposition toward disease.

[0372] In some embodiments, the peptidomimetics macrocycles can be used to treat, prevent, and/or diagnose cancers and neoplastic conditions. As used herein, the terms “cancer”, “hyperproliferative” and “neoplastic” refer to cells having the capacity for autonomous growth, i.e., an abnormal state or condition characterized by rapidly proliferating cell growth. Hyperproliferative and neoplastic disease states can be categorized as pathologic, i.e., characterizing or constituting a disease state, or can be categorized as non-pathologic, i.e., a deviation from normal but not associated with a disease state. The term is meant to include all types of cancerous growths or oncogenic processes, metastatic tissues or malignantly transformed cells, tissues, or organs, irrespective of histopathologic type or stage of invasiveness. A metastatic tumor can arise from a multitude of primary tumor types, including but not limited to those of breast, lung, liver, colon and ovarian origin. “Pathologic hyperproliferative” cells occur in disease states characterized by malignant tumor growth. Examples of non-pathologic hyperproliferative cells include proliferation of cells associated with wound repair. Examples of cellular proliferative and/or differentiative disorders include cancer, e.g., carcinoma, sarcoma, or metastatic disorders. In some embodiments, the peptidomimetics macrocycles are novel therapeutic agents for controlling breast cancer, ovarian cancer, colon cancer, lung cancer, metastasis of such cancers and the like.

[0373] Examples of cancers or neoplastic conditions include, but are not limited to, a fibrosarcoma, myosarcoma, liposarcoma, chondrosarcoma, osteogenic sarcoma, chordoma, angiosarcoma, endotheliosarcoma, lymphangiosarcoma, lymphangioendotheliosarcoma, synovioma, mesothelioma, Ewing's tumor, leiomyosarcoma, rhabdomyosarcoma, gastric cancer, esophageal cancer, rectal cancer, pancreatic cancer, ovarian cancer, prostate cancer, uterine cancer, cancer of the head and neck, skin cancer, brain cancer, squamous cell carcinoma, sebaceous gland carcinoma, papillary carcinoma, papillary adenocarcinoma, cystadenocarcinoma, medullary carcinoma, bronchogenic carcinoma, renal cell carcinoma, hepatoma, bile duct carcinoma, choriocarcinoma, seminoma, embryonal carcinoma, Wilm's tumor, cervical cancer, testicular cancer, small cell lung carcinoma, non-small cell lung carcinoma, bladder carcinoma, epithelial carcinoma, glioma, astrocytoma, medulloblastoma, craniopharyngioma, ependymoma, pinealoma, hemangioblastoma, acoustic neuroma, oligodendroglioma, meningioma, melanoma, neuroblastoma, retinoblastoma, leukemia, lymphoma, or Kaposi sarcoma.

[0374] In some embodiments, the cancer is head and neck cancer, melanoma, lung cancer, breast cancer, or glioma.

[0375] Examples of proliferative disorders include hematopoietic neoplastic disorders. As used herein, the term “hematopoietic neoplastic disorders” includes diseases involving hyperplastic/neoplastic cells of hematopoietic origin, e.g., arising from myeloid, lymphoid or erythroid lineages, or precursor cells thereof. The diseases can arise from poorly differentiated acute leukemias, e.g., erythroblastic leukemia and acute megakaryoblastic leukemia. Additional exemplary myeloid disorders include, but are not limited to, acute promyeloid leukemia (APML), acute myelogenous leukemia (AML) and chronic myelogenous leukemia (CML) (reviewed in Vaickus (1991), Crit. Rev. Oncol./Hemotol. 11:267-97); lymphoid malignancies include, but are not limited to acute lymphoblastic leukemia (ALL) which includes B-lineage ALL and T-lineage ALL, chronic lymphocytic leukemia (CLL), prolymphocytic leukemia (PLL), hairy cell leukemia (HLL) and Waldenstrom's macroglobulinemia (WM). Additional forms of malignant lymphomas include, but are not limited to non-Hodgkin lymphoma and variants thereof, peripheral T cell lymphomas, adult T cell leukemia/lymphoma (ATL), cutaneous T-cell lymphoma (CTCL), large granular lymphocytic leukemia (LGF), Hodgkin's disease and Reed-Stemberg disease.

[0376] Examples of cellular proliferative and/or differentiative disorders of the breast include, but are not limited to, proliferative breast disease including, e.g., epithelial hyperplasia, sclerosing adenosis, and small duct papillomas; tumors, e.g., stromal tumors such as fibroadenoma, phyllodes tumor, and sarcomas, and epithelial tumors such as large duct papilloma; carcinoma of the breast including in situ (noninvasive) carcinoma that includes ductal carcinoma in situ (including Paget's disease) and lobular carcinoma in situ, and invasive (infiltrating) carcinoma including, but not limited to, invasive ductal carcinoma, invasive lobular carcinoma, medullary carcinoma, colloid (mucinous) carcinoma, tubular carcinoma, and invasive papillary carcinoma, and miscellaneous malignant neoplasms. Disorders in the male breast include, but are not limited to, gynecomastia and carcinoma.

[0377] Examples of cellular proliferative and/or differentiative disorders of the skin include, but are not limited to proliferative skin disease such as melanomas, including mucosal melanoma, superficial spreading melanoma, nodular melanoma, lentigo (e.g. lentigo maligna, lentigo maligna melanoma, or acral lentiginous melanoma), amelanotic melanoma, desmoplastic melanoma, melanoma with features of a Spitz nevus, melanoma with small nevus-like cells, polypoid melanoma, and soft-tissue melanoma; basal cell carcinomas including micronodular basal cell carcinoma, superficial basal cell carcinoma, nodular basal cell carcinoma (rodent ulcer), cystic basal cell carcinoma, cicatricial basal cell carcinoma, pigmented basal cell carcinoma, aberrant basal cell carcinoma, infiltrative basal cell carcinoma, nevoid basal cell carcinoma syndrome, polypoid basal cell carcinoma, pore-like basal cell carcinoma, and fibroepithelioma of Pinkus; squamus cell carcinomas including acanthoma (large cell acanthoma), adenoid squamous cell carcinoma, basaloid squamous cell carcinoma, clear cell squamous cell carcinoma, signet-ring cell squamous cell carcinoma, spindle cell squamous cell carcinoma, Marjolin's ulcer, erythroplasia of Queyrat, and Bowen's disease; or other skin or subcutaneous tumors.

[0378] Examples of cellular proliferative and/or differentiative disorders of the lung include, but are not limited to, bronchogenic carcinoma, including paraneoplastic syndromes, bronchioloalveolar carcinoma, neuroendocrine tumors, such as bronchial carcinoid, miscellaneous tumors, and metastatic tumors; pathologies of the pleura, including inflammatory pleural effusions, noninflammatory pleural effusions, pneumothorax, and pleural tumors, including solitary fibrous tumors (pleural fibroma) and malignant mesothelioma.

[0379] Examples of cellular proliferative and/or differentiative disorders of the colon include, but are not limited to, non-neoplastic polyps, adenomas, familial syndromes, colorectal carcinogenesis, colorectal carcinoma, and carcinoid tumors.

[0380] Examples of cellular proliferative and/or differentiative disorders of the liver include, but are not limited to, nodular hyperplasias, adenomas, and malignant tumors, including primary carcinoma of the liver and metastatic tumors.

[0381] Examples of cellular proliferative and/or differentiative disorders of the ovary include, but are not limited to, ovarian tumors such as, tumors of coelomic epithelium, serous tumors, mucinous tumors, endometrioid tumors, clear cell adenocarcinoma, cystadenofibroma, Brenner tumor, surface epithelial tumors; germ cell tumors such as mature (benign) teratomas, monodermal teratomas, immature malignant teratomas, dysgerminoma, endodermal sinus tumor, choriocarcinoma; sex cord-stomal tumors such as, granulosa-theca cell tumors, thecomafibromas, androblastomas, hill cell tumors, and gonadoblastoma; and metastatic tumors such as Krukenberg tumors.

[0382] While preferred embodiments of the present invention have been shown and described herein, it will be obvious to those skilled in the art that such embodiments are provided by way of example only. Numerous variations, changes, and substitutions will now occur to those skilled in the art without departing from the invention. It should be understood that various alternatives to the embodiments described herein can be employed in practicing the invention. It is intended that the following claims define the scope and that methods and structures within the scope of these claims and their equivalents be covered thereby.

### EXAMPLES

### Example 1

### Synthesis of 6-chlorotryptophan Fmoc Amino Acids

[chemical structure]

[0384] Tert-butyl 6-chloro-3-formyl-1H-indole-1-carboxylate, 1. To a stirred solution of dry DMF (12 mL) was added dropwise POCl₃ (3.92 mL, 43 mmol, 1.3 equiv) at 0° C. under Argon. The solution was stirred at the same temperature for 20 min before a solution of 6-chloroindole (5.0 g, 33 mmol, 1 eq.) in dry DMF (30 mL) was added dropwise. The resulting mixture was allowed to warm to room temperature and stirred for an additional 2.5 h. Water (50 mL) was added and the solution was neutralized with 4M aqueous NaOH (pH ˜8). The resulting solid was filtered off, washed with water and dried under vacuum. This material was directly used in the next step without additional purification. To a stirred solution of the crude formyl indole (33 mmol, 1 eq.) in THF (150 mL) was added successively Boc₂O (7.91 g, 36.3 mmol, 1.1 equiv) and DMAP (0.4 g, 3.3 mmol, 0.1 equiv) at room temperature under N₂. The resulting mixture was stirred at room temperature for 1.5 h and the solvent was evaporated under reduced pressure. The residue was taken up in EtOAc and washed with 1N HCl, dried and concentrated to give the formyl indole 1 (9 g, 98% over 2 steps) as a white solid. ¹H NMR (CDCl₃) δ: 1.70 (s, Boc, 9H); 7.35 (dd, 1H); 8.21 (m, 3H); 10.07 (s, 1H).

[0385] Tert-butyl 6-chloro-3-(hydroxymethyl)-1H-indole-1-carboxylate, 2. To a solution of compound 1 (8.86 g, 32 mmol, 1 eq.) in ethanol (150 mL) was added NaBH₄ (2.4 g, 63 mmol, 2 eq.). The reaction was stirred for 3 h at room temperature. The reaction mixture was concentrated and the residue was poured into diethyl ether and water. The organic layer was separated, dried over magnesium sulfate and concentrated to give a white solid (8.7 g, 98%). This material was directly used in the next step without additional purification. ¹H NMR (CDCl₃) δ: 1.65 (s, Boc, 9H); 4.80 (s, 2H, CH₂); 7.21 (dd, 1H); 7.53 (m, 2H); 8.16 (bs, 1H).

[0386] Tert-butyl 3-(bromomethyl)-6-chloro-1H-indole-1-carboxylate, 3. To a solution of compound 2 (4.1 g, 14.6 mmol, 1 eq.) in dichloromethane (50 mL) under argon was added a solution of triphenylphosphine (4.59 g, 17.5 mmol, 1.2 eq.) in dichloromethane (50 mL) at −40° C. The reaction solution was stirred an additional 30 min at 40° C. Then NBS (3.38 g, 19 mmol, 1.3 eq.) was added. The resulting mixture was allowed to warm to room temperature and stirred overnight. Dichloromethane was evaporated, Carbon Tetrachloride (100 mL) was added and the mixture was stirred for 1 h and filtrated. The filtrate was concentrated, loaded in a silica plug and quickly eluted with 25% EtOAc in Hexanes. The solution was concentrated to give a white foam (3.84 g, 77%). ¹H NMR (CDCl₃) δ: 1.66 (s, Boc, 9H); 4.63 (s, 2H, CH₂); 7.28 (dd, 1H); 7.57 (d, 1H); 7.64 (bs, 1H); 8.18 (bs, 1H).

[0387] αMe-6Cl-Trp(Boc)-Ni-S-BPB, 4. To S-Ala-Ni-S-BPB (2.66 g, 5.2 mmol, 1 eq.) and KO-tBu (0.87 g, 7.8 mmol, 1.5 eq.) was added 50 mL of DMF under argon. The bromide derivative compound 3 (2.68 g, 7.8 mmol, 1.5 eq.) in solution of DMF (5.0 mL) was added via syringe. The reaction mixture was stirred at ambient temperature for 1 h. The solution was then quenched with 5% aqueous acetic acid and diluted with water. The desired product was extracted in dichloromethane, dried and concentrated. The oily product 4 was purified by flash chromatography (solid loading) on normal phase using EtOAc and Hexanes as eluents to give a red solid (1.78 g, 45% yield). αMe-6Cl-Trp(Boc)-Ni-S-BPB, 4: M+H calc. 775.21, M+H obs. 775.26; ¹H NMR (CDCl₃) δ: 1.23 (s, 3H, αMe); 1.56 (m, 11H, Boc+CH₂); 1.82-2.20 (m, 4H, 2CH₂); 3.03 (m, 1H, CH_{α}); 3.24 (m, 2H, CH₂); 3.57 and 4.29 (AB system, 2H, CH₂ (benzyl), 12.8 Hz); 6.62 (d, 2H); 6.98 (d, 1H); 7.14 (m, 2H); 7.23 (m, 1H); 7.32-7.36 (m, 5H); 7.50 (m, 2H); 7.67 (bs, 1H); 7.98 (d, 2H); 8.27 (m, 2H).

[0388] Fmoc-αMe-6Cl-Trp(Boc)-OH, 6. To a solution of 3N HCl/MeOH (⅓, 15 mL) at 50° C. was added a solution of compound 4 (1.75 g, 2.3 mmol, 1 eq.) in MeOH (5 ml) dropwise. The starting material disappeared within 3-4 h. The acidic solution was then cooled to 0° C. with an ice bath and quenched with an aqueous solution of Na₂CO₃ (1.21 g, 11.5 mmol, 5 eq.). Methanol was removed and 8 more equivalents of Na₂CO₃ (1.95 g, 18.4 mmol) were added to the suspension. The Nickel scavenging EDTA disodium salt dihydrate (1.68 g, 4.5 mmol, 2 eq.) was then added and the suspension was stirred for 2 h. A solution of Fmoc-OSu (0.84 g, 2.5 mmol, 1.1 eq.) in acetone (50 mL) was added and the reaction was stirred overnight. Afterwards, the reaction was diluted with diethyl ether and 1N HCl. The organic layer was then dried over magnesium sulfate and concentrated in vacuo. The desired product 6 was purified on normal phase using acetone and dichloromethane as eluents to give a white foam (0.9 g, 70% yield). Fmoc-αMe-6Cl-Trp(Boc)-OH, 6: M+H calc. 575.19, M+H obs. 575.37; ¹H NMR (CDCl₃) 1.59 (s, 9H, Boc); 1.68 (s, 3H, Me); 3.48 (bs, 2H, CH₂); 4.22 (m, 1H, CH); 4.39 (bs, 2H, CH₂); 5.47 (s, 1H, NH); 7.10 (m, 1H); 7.18 (m, 2H); 7.27 (m, 2H); 7.39 (m, 2H); 7.50 (m, 2H); 7.75 (d, 2H); 8.12 (bs, 1H).

[0389] 6Cl-Trp(Boc)-Ni-S-BPB, 5. To Gly-Ni-S-BPB (4.6 g, 9.2 mmol, 1 eq.) and KO-tBu (1.14 g, 10.1 mmol, 1.1 eq.) was added 95 mL of DMF under argon. The bromide derivative compound 3 (3.5 g, 4.6 mmol, 1.1 eq.) in solution of DMF (10 mL) was added via syringe. The reaction mixture was stirred at ambient temperature for 1 h. The solution was then quenched with 5% aqueous acetic acid and diluted with water. The desired product was extracted in dichloromethane, dried and concentrated. The oily product 5 was purified by flash chromatography (solid loading) on normal phase using EtOAc and Hexanes as eluents to give a red solid (5 g, 71% yield). 6Cl-Trp(Boc)-Ni-S-BPB, 5: M+H calc. 761.20, M+H obs. 761.34; ¹H NMR (CDCl₃) δ: 1.58 (m, 11H, Boc+CH₂); 1.84 (m, 1H); 1.96 (m, 1H); 2.24 (m, 2H, CH₂); 3.00 (m, 1H, CH_{α}); 3.22 (m, 2H, CH₂); 3.45 and 4.25 (AB system, 2H, CH₂ (benzyl), J=12.8 Hz); 4.27 (m, 1H, CH_{α}); 6.65 (d, 2H); 6.88 (d, 1H); 7.07 (m, 2H); 7.14 (m, 2H); 7.28 (m, 3H); 7.35-7.39 (m, 2H); 7.52 (m, 2H); 7.96 (d, 2H); 8.28 (m, 2H).

[0390] Fmoc-6Cl-Trp(Boc)-OH, 7. To a solution of 3N HCl/MeOH (⅓, 44 mL) at 50° C. was added a solution of compound 5 (5 g, 6.6 mmol, 1 eq.) in MeOH (10 ml) dropwise. The starting material disappeared within 3-4 h. The acidic solution was then cooled to 0° C. with an ice bath and quenched with an aqueous solution of Na₂CO₃ (3.48 g, 33 mmol, 5 eq.). Methanol was removed and 8 more equivalents of Na₂CO₃ (5.57 g, 52 mmol) were added to the suspension. The Nickel scavenging EDTA disodium salt dihydrate (4.89 g, 13.1 mmol, 2 eq.) and the suspension was stirred for 2 h. A solution of Fmoc-OSu (2.21 g, 6.55 mmol, 1.1 eq.) in acetone (100 mL) was added and the reaction was stirred overnight. Afterwards, the reaction was diluted with diethyl ether and 1N HCl. The organic layer was then dried over magnesium sulfate and concentrated in vacuo. The desired product 7 was purified on normal phase using acetone and dichloromethane as eluents to give a white foam (2.6 g, 69% yield). Fmoc-6Cl-Trp(Boc)-OH, 7: M+H calc. 561.17, M+H obs. 561.37; ¹H NMR (CDCl₃) 1.63 (s, 9H, Boc); 3.26 (m, 2H, CH₂); 4.19 (m, 1H, CH); 4.39 (m, 2H, CH₂); 4.76 (m, 1H); 5.35 (d, 1H, NH); 7.18 (m, 2H); 7.28 (m, 2H); 7.39 (m, 3H); 7.50 (m, 2H); 7.75 (d, 2H); 8.14 (bs, 1H).

### Example 2

### Peptidomimetic Macrocycles

[0391] Peptidomimetic macrocycles were synthesized, purified and analyzed as previously described and as described below (Schafmeister et al., J. Am. Chem. Soc. 122:5891-5892 (2000); Schafmeister & Verdine, J. Am. Chem. Soc. 122:5891 (2005); Walensky et al., Science 305:1466-1470 (2004); and U.S. Pat. No. 7,192,713). Peptidomimetic macrocycles were designed by replacing two or more naturally occurring amino acids with the corresponding synthetic amino acids. Substitutions were made at i and i+4, and i and i+7 positions. Peptide synthesis was performed either manually or on an automated peptide synthesizer (Applied Biosystems, model 433A), using solid phase conditions, rink amide AM resin (Novabiochem), and Fmoc main-chain protecting group chemistry. For the coupling of natural Fmoc-protected amino acids (Novabiochem), 10 equivalents of amino acid and a 1:1:2 molar ratio of coupling reagents HBTU/HOBt (Novabiochem)/DIEA were employed. Non-natural amino acids (4 equiv) were coupled with a 1:1:2 molar ratio of HATU (Applied Biosystems)/HOBt/DIEA. The N-termini of the synthetic peptides were acetylated, while the C-termini were amidated.

[0392] Purification of cross-linked compounds was achieved by high performance liquid chromatography (HPLC) (Varian ProStar) on a reverse phase C18 column (Varian) to yield the pure compounds. Chemical composition of the pure products was confirmed by LC/MS mass spectrometry (Micromass LCT interfaced with Agilent 1100 HPLC system) and amino acid analysis (Applied Biosystems, model 420A).

[0393] The following protocol was used in the synthesis of dialkyne-crosslinked peptidomimetic macrocycles, including SP662, SP663 and SP664. Fully protected resin-bound peptides were synthesized on a PEG-PS resin (loading 0.45 mmol/g) on a 0.2 mmol scale. Deprotection of the temporary Fmoc group was achieved by 3×10 min treatments of the resin bound peptide with 20% (v/v) piperidine in DMF. After washing with NMP (3×), dichloromethane (3×) and NMP (3×), coupling of each successive amino acid was achieved with 1×60 min incubation with the appropriate preactivated Fmoc-amino acid derivative. All protected amino acids (0.4 mmol) were dissolved in NMP and activated with HCTU (0.4 mmol) and DIEA (0.8 mmol) prior to transfer of the coupling solution to the deprotected resin-bound peptide. After coupling was completed, the resin was washed in preparation for the next deprotection/coupling cycle. Acetylation of the amino terminus was carried out in the presence of acetic anhydride/DIEA in NMP. The LC-MS analysis of a cleaved and deprotected sample obtained from an aliquot of the fully assembled resin-bound peptide was accomplished in order to verifying the completion of each coupling. In a typical example, tetrahydrofuran (4 ml) and triethylamine (2 ml) were added to the peptide resin (0.2 mmol) in a 40 ml glass vial and shaken for 10 minutes. Pd(PPh₃)₂Cl₂ (0.014 g, 0.02 mmol) and copper iodide (0.008 g, 0.04 mmol) were then added and the resulting reaction mixture was mechanically shaken 16 hours while open to atmosphere. The diyne-cyclized resin-bound peptides were deprotected and cleaved from the solid support by treatment with TFA/H₂O/TIS (95/5/5 v/v) for 2.5 h at room temperature. After filtration of the resin the TFA solution was precipitated in cold diethyl ether and centrifuged to yield the desired product as a solid. The crude product was purified by preparative HPLC.

[0394] The following protocol was used in the synthesis of single alkyne-crosslinked peptidomimetic macrocycles, including SP665. Fully protected resin-bound peptides were synthesized on a Rink amide MBHA resin (loading 0.62 mmol/g) on a 0.1 mmol scale. Deprotection of the temporary Fmoc group was achieved by 2×20 min treatments of the resin bound peptide with 25% (v/v) piperidine in NMP. After extensive flow washing with NMP and dichloromethane, coupling of each successive amino acid was achieved with 1×60 min incubation with the appropriate preactivated Fmoc-amino acid derivative. All protected amino acids (1 mmol) were dissolved in NMP and activated with HCTU (1 mmol) and DIEA (1 mmol) prior to transfer of the coupling solution to the deprotected resin-bound peptide. After coupling was completed, the resin was extensively flow washed in preparation for the next deprotection/coupling cycle. Acetylation of the amino terminus was carried out in the presence of acetic anhydride/DIEA in NMP/NMM. The LC-MS analysis of a cleaved and deprotected sample obtained from an aliquot of the fully assembled resin-bound peptide was accomplished in order to verifying the completion of each coupling. In a typical example, the peptide resin (0.1 mmol) was washed with DCM. Resin was loaded into a microwave vial. The vessel was evacuated and purged with nitrogen. Molybdenumhexacarbonyl (0.01 eq, Sigma Aldrich 199959) was added. Anhydrous chlorobenzene was added to the reaction vessel. Then 2-fluorophenol (1 eq, Sigma Aldrich F12804) was added. The reaction was then loaded into the microwave and held at 130° C. for 10 minutes. Reaction may need to be pushed a subsequent time for completion. The alkyne metathesized resin-bound peptides were deprotected and cleaved from the solid support by treatment with TFA/H₂O/TIS (94/3/3 v/v) for 3 h at room temperature. After filtration of the resin the TFA solution was precipitated in cold diethyl ether and centrifuged to yield the desired product as a solid. The crude product was purified by preparative HPLC.

[0395] Table 1 shows a list of peptidomimetic macrocycles prepared.

TABLE 1

| | | | Exact | Found | Calc | Calc | Calc |
|---|---|---|---|---|---|---|---|
| SP | Sequence | Isomer | Mass | Mass | (M + 1)/1 | (M + 2)/2 | (M + 3)/3 |
| SP1 | Ac-F$r8AYWEAc3cL$AAA-NH2 | | 1456.78 | 729.44 | 1457.79 | 729.4 | 486.6 |
| SP2 | Ac-F$r8AYWEAc3cL$AAibA-NH2 | | 1470.79 | 736.4 | 1471.8 | 736.4 | 491.27 |
| SP3 | Ac-LTF$r8AYWAQL$SANle-NH2 | | 1715.97 | 859.02 | 1716.98 | 858.99 | 573 |
| SP4 | Ac-LTF$r8AYWAQL$SAL-NH2 | | 1715.97 | 859.02 | 1716.98 | 858.99 | 573 |
| SP5 | Ac-LTF$r8AYWAQL$SAM-NH2 | | 1733.92 | 868.48 | 1734.93 | 867.97 | 578.98 |
| SP6 | Ac-LTF$r8AYWAQL$SAhL-NH2 | | 1729.98 | 865.98 | 1730.99 | 866 | 577.67 |
| SP7 | Ac-LTF$r8AYWAQL$SAF-NH2 | | 1749.95 | 876.36 | 1750.96 | 875.98 | 584.32 |
| SP8 | Ac-LTF$r8AYWAQL$SAI-NH2 | | 1715.97 | 859.02 | 1716.98 | 858.99 | 573 |
| SP9 | Ac-LTF$r8AYWAQL$SAChg-NH2 | | 1741.98 | 871.98 | 1742.99 | 872 | 581.67 |
| SP10 | Ac-LTF$r8AYWAQL$SAAib-NH2 | | 1687.93 | 845.36 | 1688.94 | 844.97 | 563.65 |
| SP11 | Ac-LTF$r8AYWAQL$SAA-NH2 | | 1673.92 | 838.01 | 1674.93 | 837.97 | 558.98 |
| SP12 | Ac-LTF$r8AYWA$L$S$Nle-NH2 | | 1767.04 | 884.77 | 1768.05 | 884.53 | 590.02 |
| SP13 | Ac-LTF$r8AYWA$L$S$A-NH2 | | 1724.99 | 864.23 | 1726 | 863.5 | 576 |
| SP14 | Ac-F$r8AYWEAc3cL$AANle-NH2 | | 1498.82 | 750.46 | 1499.83 | 750.42 | 500.61 |
| SP15 | Ac-F$r8AYWEAc3cL$AAL-NH2 | | 1498.82 | 750.46 | 1499.83 | 750.42 | 500.61 |
| SP16 | Ac-F$r8AYWEAc3cL$AAM-NH2 | | 1516.78 | 759.41 | 1517.79 | 759.4 | 506.6 |
| SP17 | Ac-F$r8AYWEAc3cL$AAhL-NH2 | | 1512.84 | 757.49 | 1513.85 | 757.43 | 505.29 |
| SP18 | Ac-F$r8AYWEAc3cL$AAF-NH2 | | 1532.81 | 767.48 | 1533.82 | 767.41 | 511.94 |
| SP19 | Ac-F$r8AYWEAc3cL$AAI-NH2 | | 1498.82 | 750.39 | 1499.83 | 750.42 | 500.61 |
| SP20 | Ac-F$r8AYWEAc3cL$AAChg-NH2 | | 1524.84 | 763.48 | 1525.85 | 763.43 | 509.29 |
| SP21 | Ac-F$r8AYWEAc3cL$AACha-NH2 | | 1538.85 | 770.44 | 1539.86 | 770.43 | 513.96 |
| SP22 | Ac-F$r8AYWEAc3cL$AAAib-NH2 | | 1470.79 | 736.84 | 1471.8 | 736.4 | 491.27 |
| SP23 | Ac-LTF$r8AYWAQL$AAAibV-NH2 | | 1771.01 | 885.81 | 1772.02 | 886.51 | 591.34 |
| SP24 | Ac-LTF$r8AYWAQL$AAAibV-NH2 | iso2 | 1771.01 | 886.26 | 1772.02 | 886.51 | 591.34 |
| SP25 | Ac-LTF$r8AYWAQL$SAibAA-NH2 | | 1758.97 | 879.89 | 1759.98 | 880.49 | 587.33 |
| SP26 | Ac-LTF$r8AYWAQL$SAibAA-NH2 | iso2 | 1758.97 | 880.34 | 1759.98 | 880.49 | 587.33 |
| SP27 | Ac-HLTF$r8HHWHQL$AANleNle-NH2 | | 2056.15 | 1028.86 | 2057.16 | 1029.08 | 686.39 |
| SP28 | Ac-DLTF$r8HHWHQL$RRLV-NH2 | | 2190.23 | 731.15 | 2191.24 | 1096.12 | 731.08 |
| SP29 | Ac-HHTF$r8HHWHQL$AAML-NH2 | | 2098.08 | 700.43 | 2099.09 | 1050.05 | 700.37 |
| SP30 | Ac-F$r8HHWHQL$RRDCha-NH2 | | 1917.06 | 959.96 | 1918.07 | 959.54 | 640.03 |
| SP31 | Ac-F$r8HHWHQL$HRFV-NH2 | | 1876.02 | 938.65 | 1877.03 | 939.02 | 626.35 |
| SP32 | Ac-HLTF$r8HHWHQL$AAhLA-NH2 | | 2028.12 | 677.2 | 2029.13 | 1015.07 | 677.05 |
| SP33 | Ac-DLTF$r8HHWHQL$RRChgl-NH2 | | 2230.26 | 1115.89 | 2231.27 | 1116.14 | 744.43 |
| SP34 | Ac-DLTF$r8HHWHQL$RRChgl-NH2 | iso2 | 2230.26 | 1115.96 | 2231.27 | 1116.14 | 744.43 |
| SP35 | Ac-HHTF$r8HHWHQL$AAChav-NH2 | | 2106.14 | 1053.95 | 2107.15 | 1054.08 | 703.05 |
| SP36 | Ac-F$r8HHWHQL$RRDa-NH2 | | 1834.99 | 918.3 | 1836 | 918.5 | 612.67 |
| SP37 | Ac-F$r8HHWHQL$HRAibG-NH2 | | 1771.95 | 886.77 | 1772.96 | 886.98 | 591.66 |
| SP38 | Ac-F$r8AYWAQL$HHNleL-NH2 | | 1730.97 | 866.57 | 1731.98 | 866.49 | 578 |
| SP39 | Ac-F$r8AYWSAL$HQANle-NH2 | | 1638.89 | 820.54 | 1639.9 | 820.45 | 547.3 |
| SP40 | Ac-F$r8AYWVQL$QHChgl-NH2 | | 1776.01 | 889.44 | 1777.02 | 889.01 | 593.01 |
| SP41 | Ac-F$r8AYWTAL$QQNlev-NH2 | | 1671.94 | 836.97 | 1672.95 | 836.98 | 558.32 |
| SP42 | Ac-F$r8AYWYQL$HAibAa-NH2 | | 1686.89 | 844.52 | 1687.9 | 844.45 | 563.3 |
| SP43 | Ac-LTF$r8AYWAQL$HHLa-NH2 | | 1903.05 | 952.27 | 1904.06 | 952.53 | 635.36 |
| SP44 | Ac-LTF$r8AYWAQL$HHLa-NH2 | iso2 | 1903.05 | 952.27 | 1904.06 | 952.53 | 635.36 |
| SP45 | Ac-LTF$r8AYWAQL$HQNlev-NH2 | | 1922.08 | 962.48 | 1923.09 | 962.05 | 641.7 |
| SP46 | Ac-LTF$r8AYWAQL$HQNlev-NH2 | iso2 | 1922.08 | 962.4 | 1923.09 | 962.05 | 641.7 |
| SP47 | Ac-LTF$r8AYWAQL$QQMl-NH2 | | 1945.05 | 973.95 | 1946.06 | 973.53 | 649.36 |
| SP48 | Ac-LTF$r8AYWAQL$QQMl-NH2 | iso2 | 1945.05 | 973.88 | 1946.06 | 973.53 | 649.36 |
| SP49 | Ac-LTF$r8AYWAQL$HAibhLV-NH2 | | 1893.09 | 948.31 | 1894.1 | 947.55 | 632.04 |
| SP50 | Ac-LTF$r8AYWAQL$AHFA-NH2 | | 1871.01 | 937.4 | 1872.02 | 936.51 | 624.68 |
| SP51 | Ac-HLTF$r8HHWHQL$AANlel-NH2 | | 2056.15 | 1028.79 | 2057.16 | 1029.08 | 686.39 |
| SP52 | Ac-DLTF$r8HHWHQL$RRLa-NH2 | | 2162.2 | 721.82 | 2163.21 | 1082.11 | 721.74 |
| SP53 | Ac-HHTF$r8HHWHQL$AAMv-NH2 | | 2084.07 | 1042.92 | 2085.08 | 1043.04 | 695.7 |
| SP54 | Ac-F$r8HHWHQL$RRDA-NH2 | | 1834.99 | 612.74 | 1836 | 918.5 | 612.67 |
| SP55 | Ac-F$r8HHWHQL$HRFCha-NH2 | | 1930.06 | 966.47 | 1931.07 | 966.04 | 644.36 |
| SP56 | Ac-F$r8AYWEAL$AA-NHAm | | 1443.82 | 1445.71 | 1444.83 | 722.92 | 482.28 |
| SP57 | Ac-F$r8AYWEAL$AA-NHiAm | | 1443.82 | 723.13 | 1444.83 | 722.92 | 482.28 |
| SP58 | Ac-F$r8AYWEAL$AA-NHnPr3Ph | | 1491.82 | 747.3 | 1492.83 | 746.92 | 498.28 |
| SP59 | Ac-F$r8AYWEAL$AA-NHnBu33Me | | 1457.83 | 1458.94 | 1458.84 | 729.92 | 486.95 |
| SP60 | Ac-F$r8AYWEAL$AA-NHnPr | | 1415.79 | 709.28 | 1416.8 | 708.9 | 472.94 |
| SP61 | Ac-F$r8AYWEAL$AA-NHnEt2Ch | | 1483.85 | 1485.77 | 1484.86 | 742.93 | 495.62 |
| SP62 | Ac-F$r8AYWEAL$AA-NHnEt2Cp | | 1469.83 | 1470.78 | 1470.84 | 735.92 | 490.95 |
| SP63 | Ac-F$r8AYWEAL$AA-NHHex | | 1457.83 | 730.19 | 1458.84 | 729.92 | 486.95 |
| SP64 | Ac-LTF$r8AYWAQL$AAIA-NH2 | | 1771.01 | 885.81 | 1772.02 | 886.51 | 591.34 |
| SP65 | Ac-LTF$r8AYWAQL$AAIA-NH2 | iso2 | 1771.01 | 866.8 | 1772.028 | 86.51 | 591.34 |
| SP66 | Ac-LTF$r8AYWAAL$AAMA-NH2 | | 1731.94 | 867.08 | 1732.95 | 866.98 | 578.32 |
| SP67 | Ac-LTF$r8AYWAAL$AAMA-NH2 | iso2 | 1731.94 | 867.28 | 1732.95 | 866.98 | 578.32 |
| SP68 | Ac-LTF$r8AYWAQL$AANleA-NH2 | | 1771.01 | 867.1 | 1772.02 | 886.51 | 591.34 |
| SP69 | Ac-LTF$r8AYWAQL$AANleA-NH2 | iso2 | 1771.01 | 886.89 | 1772.02 | 886.51 | 591.34 |
| SP70 | Ac-LTF$r8AYWAQL$AAIa-NH2 | | 1771.01 | 886.8 | 1772.02 | 886.51 | 591.34 |
| SP71 | Ac-LTF$r8AYWAQL$AAIa-NH2 | iso2 | 1771.01 | 887.09 | 1772.02 | 886.51 | 591.34 |
| SP72 | Ac-LTF$r8AYWAAL$AAMa-NH2 | | 1731.94 | 867.17 | 1732.95 | 866.98 | 578.32 |
| SP73 | Ac-LTF$r8AYWAAL$AAMa-NH2 | iso2 | 1731.94 | 867.37 | 1732.95 | 866.98 | 578.32 |
| SP74 | Ac-LTF$r8AYWAQL$AANlea-NH2 | | 1771.01 | 887.08 | 1772.02 | 886.51 | 591.34 |
| SP75 | Ac-LTF$r8AYWAQL$AANlea-NH2 | iso2 | 1771.01 | 887.08 | 1772.02 | 886.51 | 591.34 |
| SP76 | Ac-LTF$r8AYWAAL$AAIv-NH2 | | 1742.02 | 872.37 | 1743.03 | 872.02 | 581.68 |
| SP77 | Ac-LTF$r8AYWAAL$AAIv-NH2 | iso2 | 1742.02 | 872.74 | 1743.03 | 872.02 | 581.68 |
| SP78 | Ac-LTF$r8AYWAQL$AAMv-NH2 | | 1817 | 910.02 | 1818.019 | 09.51 | 606.67 |
| SP79 | Ac-LTF$r8AYWAAL$AANlev-NH2 | | 1742.02 | 872.37 | 1743.03 | 872.02 | 581.68 |
| SP80 | Ac-LTF$r8AYWAAL$AANlev-NH2 | iso2 | 1742.02 | 872.28 | 1743.03 | 872.02 | 581.68 |
| SP81 | Ac-LTF$r8AYWAQL$AAIl-NH2 | | 1813.05 | 907.81 | 1814.06 | 907.53 | 605.36 |
| SP82 | Ac-LTF$r8AYWAQL$AAIl-NH2 | iso2 | 1813.05 | 907.81 | 1814.06 | 907.53 | 605.36 |
| SP83 | Ac-LTF$r8AYWAAL$AAMl-NH2 | | 1773.99 | 887.37 | 1775 | 888 | 592.34 |
| SP84 | Ac-LTF$r8AYWAQL$AANlel-NH2 | | 1813.05 | 907.61 | 1814.06 | 907.53 | 605.36 |
| SP85 | Ac-LTF$r8AYWAQL$AANlel-NH2 | iso2 | 1813.05 | 907.71 | 1814.06 | 907.53 | 605.36 |
| SP86 | Ac-F$r8AYWEAL$AAMA-NH2 | | 1575.82 | 789.02 | 1576.83 | 788.92 | 526.28 |
| SP87 | Ac-F$r8AYWEAL$AANleA-NH2 | | 1557.86 | 780.14 | 1558.87 | 779.94 | 520.29 |
| SP88 | Ac-F$r8AYWEAL$AAIa-NH2 | | 1557.86 | 780.33 | 1558.87 | 779.94 | 520.29 |
| SP89 | Ac-F$r8AYWEAL$AAMa-NH2 | | 1575.82 | 789.3 | 1576.83 | 788.92 | 526.28 |
| SP90 | Ac-F$r8AYWEAL$AANlea-NH2 | | 1557.86 | 779.4 | 1558.87 | 779.94 | 520.29 |
| SP91 | Ac-F$r8AYWEAL$AAIv-NH2 | | 1585.89 | 794.29 | 1586.9 | 793.95 | 529.64 |
| SP92 | Ac-F$r8AYWEAL$AAMv-NH2 | | 1603.85 | 803.08 | 1604.86 | 802.93 | 535.62 |
| SP93 | Ac-F$r8AYWEAL$AANlev-NH2 | | 1585.89 | 793.46 | 1586.9 | 793.95 | 529.64 |
| SP94 | Ac-F$r8AYWEAL$AAIl-NH2 | | 1599.91 | 800.49 | 1600.92 | 800.96 | 534.31 |
| SP95 | Ac-F$r8AYWEAL$AAMl-NH2 | | 1617.86 | 809.44 | 1618.87 | 809.94 | 540.29 |
| SP96 | Ac-F$r8AYWEAL$AANlel-NH2 | | 1599.91 | 801.7 | 1600.92 | 800.96 | 534.31 |
| SP97 | Ac-F$r8AYWEAL$AANlel-NH2 | iso2 | 1599.91 | 801.42 | 1600.92 | 800.96 | 534.31 |
| SP98 | Ac-LTF$r8AY6clWAQL$SAA-NH2 | | 1707.88 | 855.72 | 1708.89 | 854.95 | 570.3 |
| SP99 | Ac-LTF$r8AY6clWAQL$SAA-NH2 | iso2 | 1707.88 | 855.35 | 1708.89 | 854.95 | 570.3 |
| SP100 | Ac-WTF$r8FYWSQL$AVAa-NH2 | | 1922.01 | 962.21 | 1923.02 | 962.01 | 641.68 |
| SP101 | Ac-WTF$r8FYWSQL$AVAa-NH2 | iso2 | 1922.01 | 962.49 | 1923.02 | 962.01 | 641.68 |
| SP102 | Ac-WTF$r8VYWSQL$AVA-NH2 | | 1802.98 | 902.72 | 1803.99 | 902.5 | 602 |
| SP103 | Ac-WTF$r8VYWSQL$AVA-NH2 | iso2 | 1802.98 | 903 | 1803.99 | 902.5 | 602 |
| SP104 | Ac-WTF$r8FYWSQL$SAAa-NH2 | | 1909.98 | 956.47 | 1910.99 | 956 | 637.67 |
| SP105 | Ac-WTF$r8FYWSQL$SAAa-NH2 | iso2 | 1909.98 | 956.47 | 1910.99 | 956 | 637.67 |
| SP106 | Ac-WTF$r8VYWSQL$AVAaa-NH2 | | 1945.05 | 974.15 | 1946.06 | 973.53 | 649.36 |
| SP107 | Ac-WTF$r8VYWSQL$AVAaa-NH2 | iso2 | 1945.05 | 973.78 | 1946.06 | 973.53 | 649.36 |
| SP108 | Ac-LTF$r8AYWAQL$AVG-NH2 | | 1671.94 | 837.52 | 1672.95 | 836.98 | 558.32 |
| SP109 | Ac-LTF$r8AYWAQL$AVG-NH2 | iso2 | 1671.94 | 837.21 | 1672.95 | 836.98 | 558.32 |
| SP110 | Ac-LTF$r8AYWAQL$AVQ-NH2 | | 1742.98 | 872.74 | 1743.99 | 872.5 | 582 |
| SP111 | Ac-LTF$r8AYWAQL$AVQ-NH2 | iso2 | 1742.98 | 872.74 | 1743.99 | 872.5 | 582 |
| SP112 | Ac-LTF$r8AYWAQL$SAa-NH2 | | 1673.92 | 838.23 | 1674.93 | 837.97 | 558.98 |
| SP113 | Ac-LTF$r8AYWAQL$SAa-NH2 | iso2 | 1673.92 | 838.32 | 1674.93 | 837.97 | 558.98 |
| SP114 | Ac-LTF$r8AYWAQhL$SAA-NH2 | | 1687.93 | 844.37 | 1688.94 | 844.97 | 563.65 |
| SP115 | Ac-LTF$r8AYWAQhL$SAA-NH2 | iso2 | 1687.93 | 844.81 | 1688.94 | 844.97 | 563.65 |
| SP116 | Ac-LTF$r8AYWEQLStSA$-NH2 | | 1826 | 905.27 | 1827.01 | 914.01 | 609.67 |
| SP117 | Ac-LTF$r8AYWAQL$SLA-NH2 | | 1715.97 | 858.48 | 1716.98 | 858.99 | 573 |
| SP118 | Ac-LTF$r8AYWAQL$SLA-NH2 | iso2 | 1715.97 | 858.87 | 1716.98 | 858.99 | 573 |
| SP119 | Ac-LTF$r8AYWAQL$SWA-NH2 | | 1788.96 | 895.21 | 1789.97 | 895.49 | 597.33 |
| SP120 | Ac-LTF$r8AYWAQL$SWA-NH2 | iso2 | 1788.96 | 895.28 | 1789.97 | 895.49 | 597.33 |
| SP121 | Ac-LTF$r8AYWAQL$SVS-NH2 | | 1717.94 | 859.84 | 1718.95 | 859.98 | 573.65 |
| SP122 | Ac-LTF$r8AYWAQL$SAS-NH2 | | 1689.91 | 845.85 | 1690.92 | 845.96 | 564.31 |
| SP123 | Ac-LTF$r8AYWAQL$SVG-NH2 | | 1687.93 | 844.81 | 1688.94 | 844.97 | 563.65 |
| SP124 | Ac-ETF$r8VYWAQL$SAa-NH2 | | 1717.91 | 859.76 | 1718.92 | 859.96 | 573.64 |
| SP125 | Ac-ETF$r8VYWAQL$SAA-NH2 | | 1717.91 | 859.84 | 1718.92 | 859.96 | 573.64 |
| SP126 | Ac-ETF$r8VYWAQL$SVA-NH2 | | 1745.94 | 873.82 | 1746.95 | 873.98 | 582.99 |
| SP127 | Ac-ETF$r8VYWAQL$SLA-NH2 | | 1759.96 | 880.85 | 1760.97 | 880.99 | 587.66 |
| SP128 | Ac-ETF$r8VYWAQL$SWA-NH2 | | 1832.95 | 917.34 | 1833.96 | 917.48 | 611.99 |
| SP129 | Ac-ETF$r8KYWAQL$SWA-NH2 | | 1861.98 | 931.92 | 1862.99 | 932 | 621.67 |
| SP130 | Ac-ETF$r8VYWAQL$SVS-NH2 | | 1761.93 | 881.89 | 1762.94 | 881.97 | 588.32 |
| SP131 | Ac-ETF$r8VYWAQL$SAS-NH2 | | 1733.9 | 867.83 | 1734.91 | 867.96 | 578.97 |
| SP132 | Ac-ETF$r8VYWAQL$SVG-NH2 | | 1731.92 | 866.87 | 1732.93 | 866.97 | 578.31 |
| SP133 | Ac-LTF$r8VYWAQL$SSa-NH2 | | 1717.94 | 859.47 | 1718.95 | 859.98 | 573.65 |
| SP134 | Ac-ETF$r8VYWAQL$SSa-NH2 | | 1733.9 | 867.83 | 1734.91 | 867.96 | 578.97 |
| SP135 | Ac-LTF$r8VYWAQL$SNa-NH2 | | 1744.96 | 873.38 | 1745.97 | 873.49 | 582.66 |
| SP136 | Ac-ETF$r8VYWAQL$SNa-NH2 | | 1760.91 | 881.3 | 1761.92 | 881.46 | 587.98 |
| SP137 | Ac-LTF$r8VYWAQL$SAa-NH2 | | 1701.95 | 851.84 | 1702.96 | 851.98 | 568.32 |
| SP138 | Ac-LTF$r8VYWAQL$SVA-NH2 | | 1729.98 | 865.53 | 1730.99 | 866 | 577.67 |
| SP139 | Ac-LTF$r8VYWAQL$SVA-NH2 | iso2 | 1729.98 | 865.9 | 1730.99 | 866 | 577.67 |
| SP140 | Ac-LTF$r8VYWAQL$SWA-NH2 | | 1816.99 | 909.42 | 1818 | 909.5 | 606.67 |
| SP141 | Ac-LTF$r8VYWAQL$SVS-NH2 | | 1745.98 | 873.9 | 1746.99 | 874 | 583 |
| SP142 | Ac-LTF$r8VYWAQL$SVS-NH2 | iso2 | 1745.98 | 873.9 | 1746.99 | 874 | 583 |
| SP143 | Ac-LTF$r8VYWAQL$SAS-NH2 | | 1717.94 | 859.84 | 1718.95 | 859.98 | 573.65 |
| SP144 | Ac-LTF$r8VYWAQL$SAS-NH2 | iso2 | 1717.94 | 859.91 | 1718.95 | 859.98 | 573.65 |
| SP145 | Ac-LTF$r8VYWAQL$SVG-NH2 | | 1715.97 | 858.87 | 1716.98 | 858.99 | 573 |
| SP146 | Ac-LTF$r8VYWAQL$SVG-NH2 | iso2 | 1715.97 | 858.87 | 1716.98 | 858.99 | 573 |
| SP147 | Ac-LTF$r8EYWAQCha$SAA-NH2 | | 1771.96 | 886.85 | 1772.97 | 886.99 | 591.66 |
| SP148 | Ac-LTF$r8EYWAQCha$SAA-NH2 | iso2 | 1771.96 | 886.85 | 1772.97 | 886.99 | 591.66 |
| SP149 | Ac-LTF$r8EYWAQCpg$SAA-NH2 | | 1743.92 | 872.86 | 1744.93 | 872.97 | 582.31 |
| SP150 | Ac-LTF$r8EYWAQCpg$SAA-NH2 | iso2 | 1743.92 | 872.86 | 1744.93 | 872.97 | 582.31 |
| SP151 | Ac-LTF$r8EYWAQF$SAA-NH2 | | 1765.91 | 883.44 | 1766.92 | 883.96 | 589.64 |
| SP152 | Ac-LTF$r8EYWAQF$SAA-NH2 | iso2 | 1765.91 | 883.89 | 1766.92 | 883.96 | 589.64 |
| SP153 | Ac-LTF$r8EYWAQCba$SAA-NH2 | | 1743.92 | 872.42 | 1744.93 | 872.97 | 582.31 |
| SP154 | Ac-LTF$r8EYWAQCba$SAA-NH2 | iso2 | 1743.92 | 873.39 | 1744.93 | 872.97 | 582.31 |
| SP155 | Ac-LTF3C1$r8EYWAQL$SAA-NH2 | | 1765.89 | 883.89 | 1766.9 | 883.95 | 589.64 |
| SP156 | Ac-LTF3C1$r8EYWAQL$SAA-NH2 | iso2 | 1765.89 | 883.96 | 1766.9 | 883.95 | 589.64 |
| SP157 | Ac-LTF34F2$r8EYWAQL$SAA-NH2 | | 1767.91 | 884.48 | 1768.92 | 884.96 | 590.31 |
| SP158 | Ac-LTF34F2$r8EYWAQL$SAA-NH2 | iso2 | 1767.91 | 884.48 | 1768.92 | 884.96 | 590.31 |
| SP159 | Ac-LTF34F2$r8EYWAQhL$SAA-NH2 | | 1781.92 | 891.44 | 1782.93 | 891.97 | 594.98 |
| SP160 | Ac-LTF34F2$r8EYWAQhL$SAA-NH2 | iso2 | 1781.92 | 891.88 | 1782.93 | 891.97 | 594.98 |
| SP161 | Ac-ETF$r8EYWAQL$SAA-NH2 | | 1747.88 | 874.34 | 1748.89 | 874.95 | 583.63 |
| SP162 | Ac-LTF$r8AYWVQL$SAA-NH2 | | 1701.95 | 851.4 | 1702.96 | 851.98 | 568.32 |
| SP163 | Ac-LTF$r8AHWAQL$SAA-NH2 | | 1647.91 | 824.83 | 1648.92 | 824.96 | 550.31 |
| SP164 | Ac-LTF$r8AEWAQL$SAA-NH2 | | 1639.9 | 820.39 | 1640.91 | 820.96 | 547.64 |
| SP165 | Ac-LTF$r8ASWAQL$SAA-NH2 | | 1597.89 | 799.38 | 1598.9 | 799.95 | 533.64 |
| SP166 | Ac-LTF$r8AEWAQL$SAA-NH2 | iso2 | 1639.9 | 820.39 | 1640.91 | 820.96 | 547.64 |
| SP167 | Ac-LTF$r8ASWAQL$SAA-NH2 | iso2 | 1597.89 | 800.31 | 1598.9 | 799.95 | 533.64 |
| SP168 | Ac-LTF$r8AF4coohWAQL$SAA-NH2 | | 1701.91 | 851.4 | 1702.92 | 851.96 | 568.31 |
| SP169 | Ac-LTF$r8AF4coohWAQL$SAA-NH2 | iso2 | 1701.91 | 851.4 | 1702.92 | 851.96 | 568.31 |
| SP170 | Ac-LTF$r8AHWAQL$AAIa-NH2 | | 1745 | 874.13 | 1746.01 | 873.51 | 582.67 |
| SP171 | Ac-ITF$r8FYWAQL$AAIa-NH2 | | 1847.04 | 923.92 | 1848.05 | 924.53 | 616.69 |
| SP172 | Ac-ITF$r8EHWAQL$AAIa-NH2 | | 1803.01 | 903.17 | 1804.02 | 902.51 | 602.01 |
| SP173 | Ac-ITF$r8EHWAQL$AAIa-NH2 | iso2 | 1803.01 | 903.17 | 1804.02 | 902.51 | 602.01 |
| SP174 | Ac-ETF$r8EHWAQL$AAIa-NH2 | | 1818.97 | 910.76 | 1819.98 | 910.49 | 607.33 |
| SP175 | Ac-ETF$r8EHWAQL$AAIa-NH2 | iso2 | 1818.97 | 910.85 | 1819.98 | 910.49 | 607.33 |
| SP176 | Ac-LTF$r8AHWVQL$AAIa-NH2 | | 1773.03 | 888.09 | 1774.04 | 887.52 | 592.02 |
| SP177 | Ac-ITF$r8FYWVQL$AAIa-NH2 | | 1875.07 | 939.16 | 1876.08 | 938.54 | 626.03 |
| SP178 | Ac-ITF$r8EYWVQL$AAIa-NH2 | | 1857.04 | 929.83 | 1858.05 | 929.53 | 620.02 |
| SP179 | Ac-ITF$r8EHWVQL$AAIa-NH2 | | 1831.04 | 916.86 | 1832.05 | 916.53 | 611.35 |
| SP180 | Ac-LTF$r8AEWAQL$AAIa-NH2 | | 1736.99 | 869.87 | 1738 | 869.5 | 580 |
| SP181 | Ac-LTF$r8AF4coohWAQL$AAIa-NH2 | | 1799 | 900.17 | 1800.01 | 900.51 | 600.67 |
| SP182 | Ac-LTF$r8AF4coohWAQL$AAIa-NH2 | iso2 | 1799 | 900.24 | 1800.01 | 900.51 | 600.67 |
| SP183 | Ac-LTF$r8AHWAQL$AHFA-NH2 | | 1845.01 | 923.89 | 1846.02 | 923.51 | 616.01 |
| SP184 | Ac-ITF$r8FYWAQL$AHFA-NH2 | | 1947.05 | 975.05 | 1948.06 | 974.53 | 650.02 |
| SP185 | Ac-ITF$r8FYWAQL$AHFA-NH2 | iso2 | 1947.05 | 976.07 | 1948.06 | 974.53 | 650.02 |
| SP186 | Ac-ITF$r8FHWAQL$AEFA-NH2 | | 1913.02 | 958.12 | 1914.03 | 957.52 | 638.68 |
| SP187 | Ac-ITF$r8FHWAQL$AEFA-NH2 | iso2 | 1913.02 | 957.86 | 1914.03 | 957.52 | 638.68 |
| SP188 | Ac-ITF$r8EHWAQL$AHFA-NH2 | | 1903.01 | 952.94 | 1904.02 | 952.51 | 635.34 |
| SP189 | Ac-ITF$r8EHWAQL$AHFA-NH2 | iso2 | 1903.01 | 953.87 | 1904.02 | 952.51 | 635.34 |
| SP190 | Ac-LTF$r8AHWVQL$AHFA-NH2 | | 1873.04 | 937.86 | 1874.05 | 937.53 | 625.35 |
| SP191 | Ac-ITF$r8FYWVQL$AHFA-NH2 | | 1975.08 | 988.83 | 1976.09 | 988.55 | 659.37 |
| SP192 | Ac-ITF$r8EYWVQL$AHFA-NH2 | | 1957.05 | 979.35 | 1958.06 | 979.53 | 653.36 |
| SP193 | Ac-ITF$r8EHWVQL$AHFA-NH2 | | 1931.05 | 967 | 1932.06 | 966.53 | 644.69 |
| SP194 | Ac-ITF$r8EHWVQL$AHFA-NH2 | iso2 | 1931.05 | 967.93 | 1932.06 | 966.53 | 644.69 |
| SP195 | Ac-ETF$r8EYWAAL$SAA-NH2 | | 1690.86 | 845.85 | 1691.87 | 846.44 | 564.63 |
| SP196 | Ac-LTF$r8AYWVAL$SAA-NH2 | | 1644.93 | 824.08 | 1645.94 | 823.47 | 549.32 |
| SP197 | Ac-LTF$r8AHWAAL$SAA-NH2 | | 1590.89 | 796.88 | 1591.9 | 796.45 | 531.3 |
| SP198 | Ac-LTF$r8AEWAAL$SAA-NH2 | | 1582.88 | 791.9 | 1583.89 | 792.45 | 528.63 |
| SP199 | Ac-LTF$r8AEWAAL$SAA-NH2 | iso2 | 1582.88 | 791.9 | 1583.89 | 792.45 | 528.63 |
| SP200 | Ac-LTF$r8ASWAAL$SAA-NH2 | | 1540.87 | 770.74 | 1541.88 | 771.44 | 514.63 |
| SP201 | Ac-LTF$r8ASWAAL$SAA-NH2 | iso2 | 1540.87 | 770.88 | 1541.88 | 771.44 | 514.63 |
| SP202 | Ac-LTF$r8AYWAAL$AAIa-NH2 | | 1713.99 | 857.39 | 1715 | 858 | 572.34 |
| SP203 | Ac-LTF$r8AYWAAL$AAIa-NH2 | iso2 | 1713.99 | 857.84 | 1715 | 858 | 572.34 |
| SP204 | Ac-LTF$r8AYWAAL$AHFA-NH2 | | 1813.99 | 907.86 | 1815 | 908 | 605.67 |
| SP205 | Ac-LTF$r8EHWAQL$AHIa-NH2 | | 1869.03 | 936.1 | 1870.04 | 935.52 | 624.02 |
| SP206 | Ac-LTF$r8EHWAQL$AHIa-NH2 | iso2 | 1869.03 | 937.03 | 1870.04 | 935.52 | 624.02 |
| SP207 | Ac-LTF$r8AHWAQL$AHIa-NH2 | | 1811.03 | 906.87 | 1812.04 | 906.52 | 604.68 |
| SP208 | Ac-LTF$r8EYWAQL$AHIa-NH2 | | 1895.04 | 949.15 | 1896.05 | 948.53 | 632.69 |
| SP209 | Ac-LTF$r8AYWAQL$AAFa-NH2 | | 1804.99 | 903.2 | 1806 | 903.5 | 602.67 |
| SP210 | Ac-LTF$r8AYWAQL$AAFa-NH2 | iso2 | 1804.99 | 903.28 | 1806 | 903.5 | 602.67 |
| SP211 | Ac-LTF$r8AYWAQL$AAWa-NH2 | | 1844 | 922.81 | 1845.01 | 923.01 | 615.67 |
| SP212 | Ac-LTF$r8AYWAQL$AAVa-NH2 | | 1756.99 | 878.86 | 1758 | 879.5 | 586.67 |
| SP213 | Ac-LTF$r8AYWAQL$AAVa-NH2 | iso2 | 1756.99 | 879.3 | 1758 | 879.5 | 586.67 |
| SP214 | Ac-LTF$r8AYWAQL$AALa-NH2 | | 1771.01 | 886.26 | 1772.02 | 886.51 | 591.34 |
| SP215 | Ac-LTF$r8AYWAQL$AALa-NH2 | iso2 | 1771.01 | 886.33 | 1772.02 | 886.51 | 591.34 |
| SP216 | Ac-LTF$r8EYWAQL$AAIa-NH2 | | 1829.01 | 914.89 | 1830.02 | 915.51 | 610.68 |
| SP217 | Ac-LTF$r8EYWAQL$AAIa-NH2 | iso2 | 1829.01 | 915.34 | 1830.02 | 915.51 | 610.68 |
| SP218 | Ac-LTF$r8EYWAQL$AAFa-NH2 | | 1863 | 932.87 | 1864.01 | 932.51 | 622.01 |
| SP219 | Ac-LTF$r8EYWAQL$AAFa-NH2 | iso2 | 1863 | 932.87 | 1864.01 | 932.51 | 622.01 |
| SP220 | Ac-LTF$r8EYWAQL$AAVa-NH2 | | 1815 | 908.23 | 1816.01 | 908.51 | 606.01 |
| SP221 | Ac-LTF$r8EYWAQL$AAVa-NH2 | iso2 | 1815 | 908.31 | 1816.01 | 908.51 | 606.01 |
| SP222 | Ac-LTF$r8EHWAQL$AAIa-NH2 | | 1803.01 | 903.17 | 1804.02 | 902.51 | 602.01 |
| SP223 | Ac-LTF$r8EHWAQL$AAIa-NH2 | iso2 | 1803.01 | 902.8 | 1804.02 | 902.51 | 602.01 |
| SP224 | Ac-LTF$r8EHWAQL$AAWa-NH2 | | 1876 | 939.34 | 1877.01 | 939.01 | 626.34 |
| SP225 | Ac-LTF$r8EHWAQL$AAWa-NH2 | iso2 | 1876 | 939.62 | 1877.01 | 939.01 | 626.34 |
| SP226 | Ac-LTF$r8EHWAQL$AALa-NH2 | | 1803.01 | 902.8 | 1804.02 | 902.51 | 602.01 |
| SP227 | Ac-LTF$r8EHWAQL$AALa-NH2 | iso2 | 1803.01 | 902.9 | 1804.02 | 902.51 | 602.01 |
| SP228 | Ac-ETF$r8EHWVQL$AALa-NH2 | | 1847 | 924.82 | 1848.01 | 924.51 | 616.67 |
| SP229 | Ac-LTF$r8AYWAQL$AAAa-NH2 | | 1728.96 | 865.89 | 1729.97 | 865.49 | 577.33 |
| SP230 | Ac-LTF$r8AYWAQL$AAAa-NH2 | iso2 | 1728.96 | 865.89 | 1729.97 | 865.49 | 577.33 |
| SP231 | Ac-LTF$r8AYWAQL$AAAibA-NH2 | | 1742.98 | 872.83 | 1743.99 | 872.5 | 582 |
| SP232 | Ac-LTF$r8AYWAQL$AAAibA-NH2 | iso2 | 1742.98 | 872.92 | 1743.99 | 872.5 | 582 |
| SP233 | Ac-LTF$r8AYWAQL$AAAAa-NH2 | | 1800 | 901.42 | 1801.01 | 901.01 | 601.01 |
| SP234 | Ac-LTF$r5AYWAQL$s8AAIa-NH2 | | 1771.01 | 887.17 | 1772.02 | 886.51 | 591.34 |
| SP235 | Ac-LTF$r5AYWAQL$s8SAA-NH2 | | 1673.92 | 838.33 | 1674.93 | 837.97 | 558.98 |
| SP236 | Ac-LTF$r8AYWAQCba$AANleA-NH2 | | 1783.01 | 892.64 | 1784.02 | 892.51 | 595.34 |
| SP237 | Ac-ETF$r8AYWAQCba$AANleA-NH2 | | 1798.97 | 900.59 | 1799.98 | 900.49 | 600.66 |
| SP238 | Ac-LTF$r8EYWAQCba$AANleA-NH2 | | 1841.01 | 922.05 | 1842.02 | 921.51 | 614.68 |
| SP239 | Ac-LTF$r8AYWAQCba$AWNleA-NH2 | | 1898.05 | 950.46 | 1899.06 | 950.03 | 633.69 |
| SP240 | Ac-ETF$r8AYWAQCba$AWNleA-NH2 | | 1914.01 | 958.11 | 1915.02 | 958.01 | 639.01 |
| SP241 | Ac-LTF$r8EYWAQCba$AWNleA-NH2 | | 1956.06 | 950.62 | 1957.07 | 979.04 | 653.03 |
| SP242 | Ac-LTF$r8EYWAQCba$SAFA-NH2 | | 1890.99 | 946.55 | 1892 | 946.5 | 631.34 |
| SP243 | Ac-LTF34F2$r8EYWAQCba$SANleA-NH2 | | 1892.99 | 947.57 | 1894 | 947.5 | 632 |
| SP244 | Ac-LTF$r8EF4coohWAQCba$SANleA-NH2 | | 1885 | 943.59 | 1886.019 | 43.51 | 629.34 |
| SP245 | Ac-LTF$r8EYWSQCba$SANleA-NH2 | | 1873 | 937.58 | 1874.019 | 37.51 | 625.34 |
| SP246 | Ac-LTF$r8EYWWQCba$SANleA-NH2 | | 1972.05 | 987.61 | 1973.06 | 987.03 | 658.36 |
| SP247 | Ac-LTF$r8EYWAQCba$AAIa-NH2 | | 1841.01 | 922.05 | 1842.02 | 921.51 | 614.68 |
| SP248 | Ac-LTF34F2$r8EYWAQCba$AAIa-NH2 | | 1876.99 | 939.99 | 1878 | 939.5 | 626.67 |
| SP249 | Ac-LTF$r8EF4coohWAQCba$AAIa-NH2 | | 1869.01 | 935.64 | 1870.02 | 935.51 | 624.01 |
| SP250 | Pam-ETF$r8EYWAQCba$SAA-NH2 | | 1956.1 | 979.57 | 1957.11 | 979.06 | 653.04 |
| SP251 | Ac-LThF$r8EFWAQCba$SAA-NH2 | | 1741.94 | 872.11 | 1742.95 | 871.98 | 581.65 |
| SP252 | Ac-LTA$r8EYWAQCba$SAA-NH2 | | 1667.89 | 835.4 | 1668.9 | 834.95 | 556.97 |
| SP253 | Ac-LTF$r8EYAAQCba$SAA-NH2 | | 1628.88 | 815.61 | 1629.89 | 815.45 | 543.97 |
| SP254 | Ac-LTF$r8EY2NalAQCba$SAA-NH2 | | 1754.93 | 879.04 | 1755.94 | 878.47 | 585.98 |
| SP255 | Ac-LTF$r8AYWAQCba$SAA-NH2 | | 1685.92 | 844.71 | 1686.93 | 843.97 | 562.98 |
| SP256 | Ac-LTF$r8EYWAQCba$SAF-NH2 | | 1819.96 | 911.41 | 1820.97 | 910.99 | 607.66 |
| SP257 | Ac-LTF$r8EYWAQCba$SAFa-NH2 | | 1890.99 | 947.41 | 1892 | 946.5 | 631.34 |
| SP258 | Ac-LTF$r8AYWAQCba$SAF-NH2 | | 1761.95 | 882.73 | 1762.96 | 881.98 | 588.32 |
| SP259 | Ac-LTF34F2Sr8AYWAQCba$SAF-NH2 | | 1797.93 | 900.87 | 1798.94 | 899.97 | 600.32 |
| SP260 | Ac-LTF$r8AF4coohWAQCba$SAF-NH2 | | 1789.94 | 896.43 | 1790.95 | 895.98 | 597.65 |
| SP261 | Ac-LTF$r8EY6c1WAQCba$SAF-NH2 | | 1853.92 | 929.27 | 1854.93 | 927.97 | 618.98 |
| SP262 | Ac-LTF$r8AYWSQCba$SAF-NH2 | | 1777.94 | 890.87 | 1778.95 | 889.98 | 593.65 |
| SP263 | Ac-LTF$r8AYWWQCba$SAF-NH2 | | 1876.99 | 939.91 | 1878 | 939.5 | 626.67 |
| SP264 | Ac-LTF$r8AYWAQCba$AAIa-NH2 | | 1783.01 | 893.19 | 1784.02 | 892.51 | 595.34 |
| SP265 | Ac-LTF34F2$r8AYWAQCba$AAIa-NH2 | | 1818.99 | 911.23 | 1820 | 910.5 | 607.34 |
| SP266 | Ac-LTF$r8AY6clWAQCba$AAIa-NH2 | | 1816.97 | 909.84 | 1817.98 | 909.49 | 606.66 |
| SP267 | Ac-LTF$r8AF4coohWAQCba$AAIa-NH2 | | 1811 | 906.88 | 1812.01 | 906.51 | 604.67 |
| SP268 | Ac-LTF$r8EYWAQCba$AAFa-NH2 | | 1875 | 938.6 | 1876.01 | 938.51 | 626.01 |
| SP269 | Ac-LTF$r8EYWAQCba$AAFa-NH2 | iso2 | 1875 | 938.6 | 1876.01 | 938.51 | 626.01 |
| SP270 | Ac-ETF$r8AYWAQCba$AWNlea-NH2 | | 1914.01 | 958.42 | 1915.02 | 958.01 | 639.01 |
| SP271 | Ac-LTF$r8EYWAQCba$AWNlea-NH2 | | 1956.06 | 979.42 | 1957.07 | 979.04 | 653.03 |
| SP272 | Ac-ETF$r8EYWAQCba$AWNlea-NH2 | | 1972.01 | 987.06 | 1973.02 | 987.01 | 658.34 |
| SP273 | Ac-ETF$r8EYWAQCba$AWNlea-NH2 | iso2 | 1972.01 | 987.06 | 1973.02 | 987.01 | 658.34 |
| SP274 | Ac-LTF$r8AYWAQCba$SAFa-NH2 | | 1832.99 | 917.89 | 1834 | 917.5 | 612 |
| SP275 | Ac-LTF$r8AYWAQCba$SAFa-NH2 | iso2 | 1832.99 | 918.07 | 1834 | 917.5 | 612 |
| SP276 | Ac-ETF$r8AYWAQL$AWNlea-NH2 | | 1902.01 | 952.22 | 1903.02 | 952.01 | 635.01 |
| SP277 | Ac-LTF$r8EYWAQL$AWNlea-NH2 | | 1944.06 | 973.5 | 1945.07 | 973.04 | 649.03 |
| SP278 | Ac-ETF$r8EYWAQL$AWNlea-NH2 | | 1960.01 | 981.46 | 1961.02 | 981.01 | 654.34 |
| SP279 | Dmaac-LTF$r8EYWAQhL$SAA-NH2 | | 1788.98 | 896.06 | 1789.99 | 895.5 | 597.33 |
| SP280 | Hexac-LTF$r8EYWAQhL$SAA-NH2 | | 1802 | 902.9 | 1803.019 | 02.01 | 601.67 |
| SP281 | Napac-LTF$r8EYWAQhL$SAA-NH2 | | 1871.99 | 937.58 | 1873 | 937 | 625 |
| SP282 | Decac-LTF$r8EYWAQhL$SAA-NH2 | | 1858.06 | 930.55 | 1859.07 | 930.04 | 620.36 |
| SP283 | Admac-LTF$r8EYWAQhL$SAA-NH2 | | 1866.03 | 934.07 | 1867.04 | 934.02 | 623.02 |
| SP284 | Tmac-LTF$r8EYWAQhL$SAA-NH2 | | 1787.99 | 895.41 | 1789 | 895 | 597 |
| SP285 | Pam-LTF$r8EYWAQhL$SAA-NH2 | | 1942.16 | 972.08 | 1943.17 | 972.09 | 648.39 |
| SP286 | Ac-LTF$r8AYWAQCba$AANleA-NH2 | iso2 | 1783.01 | 892.64 | 1784.02 | 892.51 | 595.34 |
| SP287 | Ac-LTF34F2$r8EYWAQCba$AAIa-NH2 | iso2 | 1876.99 | 939.62 | 1878 | 939.5 | 626.67 |
| SP288 | Ac-LTF34F2$r8EYWAQCba$SAA-NH2 | | 1779.91 | 892.07 | 1780.92 | 890.96 | 594.31 |
| SP289 | Ac-LTF34F2$r8EYWAQCba$SAA-NH2 | iso2 | 1779.91 | 891.61 | 1780.92 | 890.96 | 594.31 |
| SP290 | Ac-LTF$r8EF4coohWAQCba$SAA-NH2 | | 1771.92 | 887.54 | 1772.93 | 886.97 | 591.65 |
| SP291 | Ac-LTF$r8EF4coohWAQCba$SAA-NH2 | iso2 | 1771.92 | 887.63 | 1772.93 | 886.97 | 591.65 |
| SP292 | Ac-LTF$r8EYWSQCba$SAA-NH2 | | 1759.92 | 881.9 | 1760.93 | 880.97 | 587.65 |
| SP293 | Ac-LTF$r8EYWSQCba$SAA-NH2 | iso2 | 1759.92 | 881.9 | 1760.93 | 880.97 | 587.65 |
| SP294 | Ac-LTF$r8EYWAQhL$SAA-NH2 | | 1745.94 | 875.05 | 1746.95 | 873.98 | 582.99 |
| SP295 | Ac-LTF$r8AYWAQhL$SAF-NH2 | | 1763.97 | 884.02 | 1764.98 | 882.99 | 589 |
| SP296 | Ac-LTF$r8AYWAQhL$SAF-NH2 | iso2 | 1763.97 | 883.56 | 1764.98 | 882.99 | 589 |
| SP297 | Ac-LTF34F2$r8AYWAQhL$SAA-NH2 | | 1723.92 | 863.67 | 1724.93 | 862.97 | 575.65 |
| SP298 | Ac-LTF34F2$r8AYWAQhL$SAA-NH2 | iso2 | 1723.92 | 864.04 | 1724.93 | 862.97 | 575.65 |
| SP299 | Ac-LTF$r8AF4coohWAQhL$SAA-NH2 | | 1715.93 | 859.44 | 1716.94 | 858.97 | 572.98 |
| SP300 | Ac-LTF$r8AF4coohWAQhL$SAA-NH2 | iso2 | 1715.93 | 859.6 | 1716.94 | 858.97 | 572.98 |
| SP301 | Ac-LTF$r8AYWSQhL$SAA-NH2 | | 1703.93 | 853.96 | 1704.94 | 852.97 | 568.98 |
| SP302 | Ac-LTF$r8AYWSQhL$SAA-NH2 | iso2 | 1703.93 | 853.59 | 1704.94 | 852.97 | 568.98 |
| SP303 | Ac-LTF$r8EYWAQL$AANleA-NH2 | | 1829.01 | 915.45 | 1830.02 | 915.51 | 610.68 |
| SP304 | Ac-LTF34F2$r8AYWAQL$AANleA-NH2 | | 1806.99 | 904.58 | 1808 | 904.5 | 603.34 |
| SP305 | Ac-LTF$r8AF4coohWAQL$AANleA-NH2 | | 1799 | 901.6 | 1800.01 | 900.51 | 600.67 |
| SP306 | Ac-LTF$r8AYWSQL$AANleA-NH2 | | 1787 | 894.75 | 1788.01 | 894.51 | 596.67 |
| SP307 | Ac-LTF34F2$r8AYWAQhL$AANleA-NH2 | | 1821 | 911.79 | 1822.01 | 911.51 | 608.01 |
| SP308 | Ac-LTF34F2$r8AYWAQhL$AANleA-NH2 | iso2 | 1821 | 912.61 | 1822.01 | 911.51 | 608.01 |
| SP309 | Ac-LTF$r8AF4coohWAQhL$AANleA-NH2 | | 1813.02 | 907.95 | 1814.03 | 907.52 | 605.35 |
| SP310 | Ac-LTF$r8AF4coohWAQhL$AANleA-NH2 | iso2 | 1813.02 | 908.54 | 1814.03 | 907.52 | 605.35 |
| SP311 | Ac-LTF$r8AYWSQhL$AANleA-NH2 | | 1801.02 | 901.84 | 1802.03 | 901.52 | 601.35 |
| SP312 | Ac-LTF$r8AYWSQhL$AANleA-NH2 | iso2 | 1801.02 | 902.62 | 1802.03 | 901.52 | 601.35 |
| SP313 | Ac-LTF$r8AYWAQhL$AAAAa-NH2 | | 1814.01 | 908.63 | 1815.02 | 908.01 | 605.68 |
| SP314 | Ac-LTF$r8AYWAQhL$AAAAa-NH2 | iso2 | 1814.01 | 908.34 | 1815.02 | 908.01 | 605.68 |
| SP315 | Ac-LTF$r8AYWAQL$AAAAAa-NH2 | | 1871.04 | 936.94 | 1872.05 | 936.53 | 624.69 |
| SP316 | Ac-LTF$r8AYWAQL$AAAAAAa-NH2 | iso2 | 1942.07 | 972.5 | 1943.08 | 972.04 | 648.37 |
| SP317 | Ac-LTF$r8AYWAQL$AAAAAAa-NH2 | iso1 | 1942.07 | 972.5 | 1943.08 | 972.04 | 648.37 |
| SP318 | Ac-LTF$r8EYWAQhL$AANleA-NH2 | | 1843.03 | 922.54 | 1844.04 | 922.52 | 615.35 |
| SP319 | Ac-AATF$r8AYWAQL$AANleA-NH2 | | 1800 | 901.39 | 1801.01 | 901.01 | 601.01 |
| SP320 | Ac-LTF$r8AYWAQL$AANleAA-NH2 | | 1842.04 | 922.45 | 1843.05 | 922.03 | 615.02 |
| SP321 | Ac-ALTF$r8AYWAQL$AANleAA-NH2 | | 1913.08 | 957.94 | 1914.09 | 957.55 | 638.7 |
| SP322 | Ac-LTF$r8AYWAQCba$AANleAA-NH2 | | 1854.04 | 928.43 | 1855.05 | 928.03 | 619.02 |
| SP323 | Ac-LTF$r8AYWAQhL$AANleAA-NH2 | | 1856.06 | 929.4 | 1857.07 | 929.04 | 619.69 |
| SP324 | Ac-LTF$r8EYWAQCba$SAAA-NH2 | | 1814.96 | 909.37 | 1815.97 | 908.49 | 605.99 |
| SP325 | Ac-LTF$r8EYWAQCba$SAAA-NH2 | iso2 | 1814.96 | 909.37 | 1815.97 | 908.49 | 605.99 |
| SP326 | Ac-LTF$r8EYWAQCba$SAAAA-NH2 | | 1886 | 944.61 | 1887.01 | 944.01 | 629.67 |
| SP327 | Ac-LTF$r8EYWAQCba$SAAAA-NH2 | iso2 | 1886 | 944.61 | 1887.01 | 944.01 | 629.67 |
| SP328 | Ac-ALTF$r8EYWAQCba$SAA-NH2 | | 1814.96 | 909.09 | 1815.97 | 908.49 | 605.99 |
| SP329 | Ac-ALTF$r8EYWAQCba$SAAA-NH2 | | 1886 | 944.61 | 1887.01 | 944.01 | 629.67 |
| SP330 | Ac-ALTF$r8EYWAQCba$SAA-NH2 | iso2 | 1814.96 | 909.09 | 1815.97 | 908.49 | 605.99 |
| SP331 | Ac-LTF$r8EYWAQL$AAAAAa-NH2 | iso2 | 1929.04 | 966.08 | 1930.05 | 965.53 | 644.02 |
| SP332 | Ac-LTF$r8EY6clWAQCba$SAA-NH2 | | 1777.89 | 890.78 | 1778.9 | 889.95 | 593.64 |
| SP333 | Ac-LTF$r8EF4cooh6c1WAQCba$SANleA- | | 1918.96 | 961.27 | 1919.97 | 960.49 | 640.66 |
| | NH2 | | | | | | |
| SP334 | Ac-LTF$r8EF4cooh6c1WAQCba$SANleA- | iso2 | 1918.96 | 961.27 | 1919.97 | 960.49 | 640.66 |
| | NH2 | | | | | | |
| SP335 | Ac-LTF$r8EF4cooh6clWAQCba$AAIa-NH2 | | 1902.97 | 953.03 | 1903.98 | 952.49 | 635.33 |
| SP336 | Ac-LTF$r8EF4cooh6clWAQCba$AAIa-NH2 | iso2 | 1902.97 | 953.13 | 1903.98 | 952.49 | 635.33 |
| SP337 | Ac-LTF$r8AY6clWAQL$AAAAAa-NH2 | | 1905 | 954.61 | 1906.01 | 953.51 | 636.01 |
| SP338 | Ac-LTF$r8AY6clWAQL$AAAAAa-NH2 | iso2 | 1905 | 954.9 | 1906.01 | 953.51 | 636.01 |
| SP339 | Ac-F$r8AY6clWEAL$AAAAAAa-NH2 | | 1762.89 | 883.01 | 1763.9 | 882.45 | 588.64 |
| SP340 | Ac-ETF$r8EYWAQL$AAAAAa-NH2 | | 1945 | 974.31 | 1946.01 | 973.51 | 649.34 |
| SP341 | Ac-ETF$r8EYWAQL$AAAAAa-NH2 | iso2 | 1945 | 974.49 | 1946.01 | 973.51 | 649.34 |
| SP342 | Ac-LTF$r8EYWAQL$AAAAAAa-NH2 | | 2000.08 | 1001.6 | 2001.09 | 1001.05 | 667.7 |
| SP343 | Ac-LTF$r8EYWAQL$AAAAAAa-NH2 | iso2 | 2000.08 | 1001.6 | 2001.09 | 1001.05 | 667.7 |
| SP344 | Ac-LTF$r8AYWAQL$AANleAAa-NH2 | | 1913.08 | 958.58 | 1914.09 | 957.55 | 638.7 |
| SP345 | Ac-LTF$r8AYWAQL$AANleAAa-NH2 | iso2 | 1913.08 | 958.58 | 1914.09 | 957.55 | 638.7 |
| SP346 | Ac-LTF$r8EYWAQCba$AAAAAa-NH2 | | 1941.04 | 972.55 | 1942.05 | 971.53 | 648.02 |
| SP347 | Ac-LTF$r8EYWAQCba$AAAAAa-NH2 | iso2 | 1941.04 | 972.55 | 1942.05 | 971.53 | 648.02 |
| SP348 | Ac-LTF$r8EF4coohWAQCba$AAAAAa-NH2 | | 1969.04 | 986.33 | 1970.05 | 985.53 | 657.35 |
| SP349 | Ac-LTF$r8EF4coohWAQCba$AAAAAa-NH2 | iso2 | 1969.04 | 986.06 | 1970.05 | 985.53 | 657.35 |
| SP350 | Ac-LTF$r8EYWSQCba$AAAAAa-NH2 | | 1957.04 | 980.04 | 1958.05 | 979.53 | 653.35 |
| SP351 | Ac-LTF$r8EYWSQCba$AAAAAa-NH2 | iso2 | 1957.04 | 980.04 | 1958.05 | 979.53 | 653.35 |
| SP352 | Ac-LTF$r8EYWAQCba$SAAa-NH2 | | 1814.96 | 909 | 1815.97 | 908.49 | 605.99 |
| SP353 | Ac-LTF$r8EYWAQCba$SAAa-NH2 | iso2 | 1814.96 | 909 | 1815.97 | 908.49 | 605.99 |
| SP354 | Ac-ALTF$r8EYWAQCba$SAAa-NH2 | | 1886 | 944.52 | 1887.01 | 944.01 | 629.67 |
| SP355 | Ac-ALTF$r8EYWAQCba$SAAa-NH2 | iso2 | 1886 | 944.98 | 1887.01 | 944.01 | 629.67 |
| SP356 | Ac-ALTF$r8EYWAQCba$SAAAa-NH2 | | 1957.04 | 980.04 | 1958.05 | 979.53 | 653.35 |
| SP357 | Ac-ALTF$r8EYWAQCba$SAAAa-NH2 | iso2 | 1957.04 | 980.04 | 1958.05 | 979.53 | 653.35 |
| SP358 | Ac-AALTF$r8EYWAQCba$SAAAa-NH2 | | 2028.07 | 1016.1 | 2029.08 | 1015.04 | 677.03 |
| SP359 | Ac-AALTF$r8EYWAQCba$SAAAa-NH2 | iso2 | 2028.07 | 1015.57 | 2029.08 | 1015.04 | 677.03 |
| SP360 | Ac-RTF$r8EYWAQCba$SAA-NH2 | | 1786.94 | 895.03 | 1787.95 | 894.48 | 596.65 |
| SP361 | Ac-LRF$r8EYWAQCba$SAA-NH2 | | 1798.98 | 901.51 | 1799.99 | 900.5 | 600.67 |
| SP362 | Ac-LTF$r8EYWRQCba$SAA-NH2 | | 1828.99 | 916.4 | 1830 | 915.5 | 610.67 |
| SP363 | Ac-LTF$r8EYWARCba$SAA-NH2 | | 1771.97 | 887.63 | 1772.98 | 886.99 | 591.66 |
| SP364 | Ac-LTF$r8EYWAQCba$RAA-NH2 | | 1812.99 | 908.08 | 1814 | 907.5 | 605.34 |
| SP365 | Ac-LTF$r8EYWAQCba$SRA-NH2 | | 1828.99 | 916.12 | 1830 | 915.5 | 610.67 |
| SP366 | Ac-LTF$r8EYWAQCba$SAR-NH2 | | 1828.99 | 916.12 | 1830 | 915.5 | 610.67 |
| SP367 | 5-FAM-BaLTF$r8EYWAQCba$SAA-NH2 | | 2131 | 1067.09 | 2132.01 | 1066.51 | 711.34 |
| SP368 | 5-FAM-BaLTF$r8AYWAQL$AANleA-NH2 | | 2158.08 | 1080.6 | 2159.09 | 1080.05 | 720.37 |
| SP369 | Ac-LAF$r8EYWAQL$AANleA-NH2 | | 1799 | 901.05 | 1800.01 | 900.51 | 600.67 |
| SP370 | Ac-ATF$r8EYWAQL$AANleA-NH2 | | 1786.97 | 895.03 | 1787.98 | 894.49 | 596.66 |
| SP371 | Ac-AAF$r8EYWAQL$AANleA-NH2 | | 1756.96 | 880.05 | 1757.97 | 879.49 | 586.66 |
| SP372 | Ac-AAAF$r8EYWAQL$AANleA-NH2 | | 1827.99 | 915.57 | 1829 | 915 | 610.34 |
| SP373 | Ac-AAAAF$r8EYWAQL$AANleA-NH2 | | 1899.03 | 951.09 | 1900.04 | 950.52 | 634.02 |
| SP374 | Ac-AATF$r8EYWAQL$AANleA-NH2 | | 1858 | 930.92 | 1859.01 | 930.01 | 620.34 |
| SP375 | Ac-AALTF$r8EYWAQL$AANleA-NH2 | | 1971.09 | 987.17 | 1972.1 | 986.55 | 658.04 |
| SP376 | Ac-AAALTF$r8EYWAQL$AANleA-NH2 | | 2042.12 | 1023.15 | 2043.13 | 1022.07 | 681.71 |
| SP377 | Ac-LTF$r8EYWAQL$AANleAA-NH2 | | 1900.05 | 952.02 | 1901.06 | 951.03 | 634.36 |
| SP378 | Ac-ALTF$r8EYWAQL$AANleAA-NH2 | | 1971.09 | 987.63 | 1972.1 | 986.55 | 658.04 |
| SP379 | Ac-AALTF$r8EYWAQL$AANleAA-NH2 | | 2042.12 | 1022.69 | 2043.13 | 1022.07 | 681.71 |
| SP380 | Ac-LTF$r8EYWAQCba$AANleAA-NH2 | | 1912.05 | 958.03 | 1913.06 | 957.03 | 638.36 |
| SP381 | Ac-LTF$r8EYWAQhL$AANleAA-NH2 | | 1914.07 | 958.68 | 1915.08 | 958.04 | 639.03 |
| SP382 | Ac-ALTF$r8EYWAQhL$AANleAA-NH2 | | 1985.1 | 994.1 | 1986.11 | 993.56 | 662.71 |
| SP383 | Ac-LTF$r8ANmYWAQL$AANleA-NH2 | | 1785.02 | 894.11 | 1786.03 | 893.52 | 596.01 |
| SP384 | Ac-LTF$r8ANmYWAQL$AANleA-NH2 | iso2 | 1785.02 | 894.11 | 1786.03 | 893.52 | 596.01 |
| SP385 | Ac-LTF$r8AYNmWAQL$AANleA-NH2 | | 1785.02 | 894.11 | 1786.03 | 893.52 | 596.01 |
| SP386 | Ac-LTF$r8AYNmWAQL$AANleA-NH2 | iso2 | 1785.02 | 894.11 | 1786.03 | 893.52 | 596.01 |
| SP387 | Ac-LTF$r8AYAmwAQL$AANleA-NH2 | | 1785.02 | 894.01 | 1786.03 | 893.52 | 596.01 |
| SP388 | Ac-LTF$r8AYAmwAQL$AANleA-NH2 | iso2 | 1785.02 | 894.01 | 1786.03 | 893.52 | 596.01 |
| SP389 | Ac-LTF$r8AYWAibQL$AANleA-NH2 | | 1785.02 | 894.01 | 1786.03 | 893.52 | 596.01 |
| SP390 | Ac-LTF$r8AYWAibQL$AANleA-NH2 | iso2 | 1785.02 | 894.01 | 1786.03 | 893.52 | 596.01 |
| SP391 | Ac-LTF$r8AYWAQL$AAibNleA-NH2 | | 1785.02 | 894.38 | 1786.03 | 893.52 | 596.01 |
| SP392 | Ac-LTF$r8AYWAQL$AAibNleA-NH2 | iso2 | 1785.02 | 894.38 | 1786.03 | 893.52 | 596.01 |
| SP393 | Ac-LTF$r8AYWAQL$AaNleA-NH2 | | 1771.01 | 887.54 | 1772.02 | 886.51 | 591.34 |
| SP394 | Ac-LTF$r8AYWAQL$AaNleA-NH2 | iso2 | 1771.01 | 887.54 | 1772.02 | 886.51 | 591.34 |
| SP395 | Ac-LTF$r8AYWAQL$ASarNleA-NH2 | | 1771.01 | 887.35 | 1772.02 | 886.51 | 591.34 |
| SP396 | Ac-LTF$r8AYWAQL$ASarNleA-NH2 | iso2 | 1771.01 | 887.35 | 1772.02 | 886.51 | 591.34 |
| SP397 | Ac-LTF$r8AYWAQL$AANleAib-NH2 | | 1785.02 | 894.75 | 1786.03 | 893.52 | 596.01 |
| SP398 | Ac-LTF$r8AYWAQL$AANleAib-NH2 | iso2 | 1785.02 | 894.75 | 1786.03 | 893.52 | 596.01 |
| SP399 | Ac-LTF$r8AYWAQL$AANleNmA-NH2 | | 1785.02 | 894.6 | 1786.03 | 893.52 | 596.01 |
| SP400 | Ac-LTF$r8AYWAQL$AANleNmA-NH2 | iso2 | 1785.02 | 894.6 | 1786.03 | 893.52 | 596.01 |
| SP401 | Ac-LTF$r8AYWAQL$AANleSar-NH2 | | 1771.01 | 886.98 | 1772.02 | 886.51 | 591.34 |
| SP402 | Ac-LTF$r8AYWAQL$AANleSar-NH2 | iso2 | 1771.01 | 886.98 | 1772.02 | 886.51 | 591.34 |
| SP403 | Ac-LTF$r8AYWAQL$AANleAAib-NH2 | | 1856.06 | 1857.07 | 929.04 | 619.69 | |
| SP404 | Ac-LTF$r8AYWAQL$AANleAAib-NH2 | iso2 | 1856.06 | 1857.07 | 929.04 | 619.69 | |
| SP405 | Ac-LTF$r8AYWAQL$AANleANmA-NH2 | | 1856.06 | 930.37 | 1857.07 | 929.04 | 619.69 |
| SP406 | Ac-LTF$r8AYWAQL$AANleANmA-NH2 | iso2 | 1856.06 | 930.37 | 1857.07 | 929.04 | 619.69 |
| SP407 | Ac-LTF$r8AYWAQL$AANleAa-NH2 | | 1842.04 | 922.69 | 1843.05 | 922.03 | 615.02 |
| SP408 | Ac-LTF$r8AYWAQL$AANleAa-NH2 | iso2 | 1842.04 | 922.69 | 1843.05 | 922.03 | 615.02 |
| SP409 | Ac-LTF$r8AYWAQL$AANleASar-NH2 | | 1842.04 | 922.6 | 1843.05 | 922.03 | 615.02 |
| SP410 | Ac-LTF$r8AYWAQL$AANleASar-NH2 | iso2 | 1842.04 | 922.6 | 1843.05 | 922.03 | 615.02 |
| SP411 | Ac-LTF$/r8AYWAQL$/AANleA-NH2 | | 1799.04 | 901.14 | 1800.05 | 900.53 | 600.69 |
| SP412 | Ac-LTFAibAYWAQLAibAANleA-NH2 | | 1648.9 | 826.02 | 1649.91 | 825.46 | 550.64 |
| SP413 | Ac-LTF$r8Cou4YWAQL$AANleA-NH2 | | 1975.05 | 989.11 | 1976.06 | 988.53 | 659.36 |
| SP414 | Ac-LTF$r8Cou4YWAQL$AANleA-NH2 | iso2 | 1975.05 | 989.11 | 1976.06 | 988.53 | 659.36 |
| SP415 | Ac-LTF$r8AYWCou4QL$AANleA-NH2 | | 1975.05 | 989.11 | 1976.06 | 988.53 | 659.36 |
| SP416 | Ac-LTF$r8AYWAQL$Cou4ANleA-NH2 | | 1975.05 | 989.57 | 1976.06 | 988.53 | 659.36 |
| SP417 | Ac-LTF$r8AYWAQL$Cou4ANleA-NH2 | iso2 | 1975.05 | 989.57 | 1976.06 | 988.53 | 659.36 |
| SP418 | Ac-LTF$r8AYWAQL$ACou4NleA-NH2 | | 1975.05 | 989.57 | 1976.06 | 988.53 | 659.36 |
| SP419 | Ac-LTF$r8AYWAQL$ACou4NleA-NH2 | iso2 | 1975.05 | 989.57 | 1976.06 | 988.53 | 659.36 |
| SP420 | Ac-LTF$r8AYWAQL$AANleA-OH | | 1771.99 | 887.63 | 1773 | 887 | 591.67 |
| SP421 | Ac-LTF$r8AYWAQL$AANleA-OH | iso2 | 1771.99 | 887.63 | 1773 | 887 | 591.67 |
| SP422 | Ac-LTF$r8AYWAQL$AANleA-NHnPr | | 1813.05 | 908.08 | 1814.06 | 907.53 | 605.36 |
| SP423 | Ac-LTF$r8AYWAQL$AANleA-NHnPr | iso2 | 1813.05 | 908.08 | 1814.06 | 907.53 | 605.36 |
| SP424 | Ac-LTF$r8AYWAQL$AANleA-NHnBu33Me | | 1855.1 | 929.17 | 1856.11 | 928.56 | 619.37 |
| SP425 | Ac-LTF$r8AYWAQL$AANleA-NHnBu33Me | iso2 | 1855.1 | 929.17 | 1856.11 | 928.56 | 619.37 |
| SP426 | Ac-LTF$r8AYWAQL$AANleA-NHHex | | 1855.1 | 929.17 | 1856.11 | 928.56 | 619.37 |
| SP427 | Ac-LTF$r8AYWAQL$AANleA-NHHex | iso2 | 1855.1 | 929.17 | 1856.11 | 928.56 | 619.37 |
| SP428 | Ac-LTA$r8AYWAQL$AANleA-NH2 | | 1694.98 | 849.33 | 1695.99 | 848.5 | 566 |
| SP429 | Ac-LThL$r8AYWAQL$AANleA-NH2 | | 1751.04 | 877.09 | 1752.05 | 876.53 | 584.69 |
| SP430 | Ac-LTF$r8AYAAQL$AANleA-NH2 | | 1655.97 | 829.54 | 1656.98 | 828.99 | 553 |
| SP431 | Ac-LTF$r8AY2NalAQL$AANleA-NH2 | | 1782.01 | 892.63 | 1783.02 | 892.01 | 595.01 |
| SP432 | Ac-LTF$r8EYWCou4QCba$SAA-NH2 | | 1947.97 | 975.8 | 1948.98 | 974.99 | 650.33 |
| SP433 | Ac-LTF$r8EYWCou7QCba$SAA-NH2 | | 16.03 | 974.9 | 17.04 | 9.02 | 6.35 |
| SP434 | Ac-LTF%r8EYWAQCba%SAA-NH2 | | 1745.94 | 874.8 | 1746.95 | 873.98 | 582.99 |
| SP435 | Dmaac-LTF$r8EYWAQCba$SAA-NH2 | | 1786.97 | 894.8 | 1787.98 | 894.49 | 596.66 |
| SP436 | Dmaac-LTF$r8AYWAQL$AAAAAa-NH2 | | 1914.08 | 958.2 | 1915.09 | 958.05 | 639.03 |
| SP437 | Dmaac-LTF$r8AYWAQL$AAAAAa-NH2 | iso2 | 1914.08 | 958.2 | 1915.09 | 958.05 | 639.03 |
| SP438 | Dmaac-LTF$r8EYWAQL$AAAAAa-NH2 | | 1972.08 | 987.3 | 1973.09 | 987.05 | 658.37 |
| SP439 | Dmaac-LTF$r8EYWAQL$AAAAAa-NH2 | iso2 | 1972.08 | 987.3 | 1973.09 | 987.05 | 658.37 |
| SP440 | Dmaac-LTF$r8EF4coohWAQCba$AAIa-NH2 | | 1912.05 | 957.4 | 1913.06 | 957.03 | 638.36 |
| SP441 | Dmaac-LTF$r8EF4coohWAQCba$AAIa-NH2 | iso2 | 1912.05 | 957.4 | 1913.06 | 957.03 | 638.36 |
| SP442 | Dmaac-LTF$r8AYWAQL$AANleA-NH2 | | 1814.05 | 908.3 | 1815.06 | 908.03 | 605.69 |
| SP443 | Dmaac-LTF$r8AYWAQL$AANleA-NH2 | iso2 | 1814.05 | 908.3 | 1815.06 | 908.03 | 605.69 |
| SP444 | Ac-LTF%r8AYWAQL%AANleA-NH2 | | 1773.02 | 888.37 | 1774.03 | 887.52 | 592.01 |
| SP445 | Ac-LTF%r8EYWAQL%AAAAAa-NH2 | | 1931.06 | 966.4 | 1932.07 | 966.54 | 644.69 |
| SP446 | Cou6BaLTF$r8EYWAQhL$SAA-NH2 | | 2018.05 | 1009.9 | 2019.06 | 1010.03 | 673.69 |
| SP447 | Cou8BaLTF$r8EYWAQhL$SAA-NH2 | | 1962.96 | 982.34 | 1963.97 | 982.49 | 655.32 |
| SP448 | Ac-LTF4I$r8EYWAQL$AAAAAa-NH2 | | 2054.93 | 1028.68 | 2055.94 | 1028.47 | 685.98 |
| SP449 | Ac-LTF$r8EYWAQL$AAAAAa-NH2 | | 1929.04 | 966.17 | 1930.05 | 965.53 | 644.02 |
| SP550 | Ac-LTF$r8EYWAQL$AAAAAa-OH | | 1930.02 | 966.54 | 1931.03 | 966.02 | 644.35 |
| SP551 | Ac-LTF$r8EYWAQL$AAAAAa-OH | iso2 | 1930.02 | 965.89 | 1931.03 | 966.02 | 644.35 |
| SP552 | Ac-LTF$r8EYWAEL$AAAAAa-NH2 | | 1930.02 | 966.82 | 1931.03 | 966.02 | 644.35 |
| SP553 | Ac-LTF$r8EYWAEL$AAAAAa-NH2 | iso2 | 1930.02 | 966.91 | 1931.03 | 966.02 | 644.35 |
| SP554 | Ac-LTF$r8EYWAEL$AAAAAa-OH | | 1931.01 | 967.28 | 1932.02 | 966.51 | 644.68 |
| SP555 | Ac-LTF$r8EY6clWAQL$AAAAAa-NH2 | | 1963 | 983.28 | 1964.01 | 982.51 | 655.34 |
| SP556 | Ac-LTF$r8EF4bOH2WAQL$AAAAAa-NH2 | | 1957.05 | 980.04 | 1958.06 | 979.53 | 653.36 |
| SP557 | Ac-AAALTF$r8EYWAQL$AAAAAa-NH2 | | 2142.15 | 1072.83 | 2143.16 | 1072.08 | 715.06 |
| SP558 | Ac-LTF34F2$r8EYWAQL$AAAAAa-NH2 | | 1965.02 | 984.3 | 1966.03 | 983.52 | 656.01 |
| SP559 | Ac-RTF$r8EYWAQL$AAAAAa-NH2 | | 1972.06 | 987.81 | 1973.07 | 987.04 | 658.36 |
| SP560 | Ac-LTA$r8EYWAQL$AAAAAa-NH2 | | 1853.01 | 928.33 | 1854.02 | 927.51 | 618.68 |
| SP561 | Ac-LTF$r8EYWAibQL$AAAAAa-NH2 | | 1943.06 | 973.48 | 1944.07 | 972.54 | 648.69 |
| SP562 | Ac-LTF$r8EYWAQL$AAibAAAa-NH2 | | 1943.06 | 973.11 | 1944.07 | 972.54 | 648.69 |
| SP563 | Ac-LTF$r8EYWAQL$AAAibAAa-NH2 | | 1943.06 | 973.48 | 1944.07 | 972.54 | 648.69 |
| SP564 | Ac-LTF$r8EYWAQL$AAAAibAa-NH2 | | 1943.06 | 973.48 | 1944.07 | 972.54 | 648.69 |
| SP565 | Ac-LTF$r8EYWAQL$AAAAAiba-NH2 | | 1943.06 | 973.38 | 1944.07 | 972.54 | 648.69 |
| SP566 | Ac-LTF$r8EYWAQL$AAAAAiba-NH2 | iso2 | 1943.06 | 973.38 | 1944.07 | 972.54 | 648.69 |
| SP567 | Ac-LTF$r8EYWAQL$AAAAAAib-NH2 | | 1943.06 | 973.01 | 1944.07 | 972.54 | 648.69 |
| SP568 | Ac-LTF$r8EYWAQL$AaAAAa-NH2 | | 1929.04 | 966.54 | 1930.05 | 965.53 | 644.02 |
| SP569 | Ac-LTF$r8EYWAQL$AAaAAa-NH2 | | 1929.04 | 966.35 | 1930.05 | 965.53 | 644.02 |
| SP570 | Ac-LTF$r8EYWAQL$AAAaAa-NH2 | | 1929.04 | 966.54 | 1930.05 | 965.53 | 644.02 |
| SP571 | Ac-LTF$r8EYWAQL$AAAaAa-NH2 | iso2 | 1929.04 | 966.35 | 1930.05 | 965.53 | 644.02 |
| SP572 | Ac-LTF$r8EYWAQL$AAAAaa-NH2 | | 1929.04 | 966.35 | 1930.05 | 965.53 | 644.02 |
| SP573 | Ac-LTF$r8EYWAQL$AAAAAA-NH2 | | 1929.04 | 966.35 | 1930.05 | 965.53 | 644.02 |
| SP574 | Ac-LTF$r8EYWAQL$ASarAAAa-NH2 | | 1929.04 | 966.54 | 1930.05 | 965.53 | 644.02 |
| SP575 | Ac-LTF$r8EYWAQL$AASarAAa-NH2 | | 1929.04 | 966.35 | 1930.05 | 965.53 | 644.02 |
| SP576 | Ac-LTF$r8EYWAQL$AAASarAa-NH2 | | 1929.04 | 966.35 | 1930.05 | 965.53 | 644.02 |
| SP577 | Ac-LTF$r8EYWAQL$AAAASara-NH2 | | 1929.04 | 966.35 | 1930.05 | 965.53 | 644.02 |
| SP578 | Ac-LTF$r8EYWAQL$AAAAASar-NH2 | | 1929.04 | 966.08 | 1930.05 | 965.53 | 644.02 |
| SP579 | Ac-7LTF$r8EYWAQL$AAAAAa-NH2 | | 1918.07 | 951.99 | 1919.08 | 960.04 | 640.37 |
| SP581 | Ac-TF$r8EYWAQL$AAAAAa-NH2 | | 1815.96 | 929.85 | 1816.97 | 908.99 | 606.33 |
| SP582 | Ac-F$r8EYWAQL$AAAAAa-NH2 | | 1714.91 | 930.92 | 1715.92 | 858.46 | 572.64 |
| SP583 | Ac-LVF$r8EYWAQL$AAAAAa-NH2 | | 1927.06 | 895.12 | 1928.07 | 964.54 | 643.36 |
| SP584 | Ac-AAF$r8EYWAQL$AAAAAa-NH2 | | 1856.98 | 859.51 | 1857.99 | 929.5 | 620 |
| SP585 | Ac-LTF$r8EYWAQL$AAAAa-NH2 | | 1858 | 824.08 | 1859.01 | 930.01 | 620.34 |
| SP586 | Ac-LTF$r8EYWAQL$AAAa-NH2 | | 1786.97 | 788.56 | 1787.98 | 894.49 | 596.66 |
| SP587 | Ac-LTF$r8EYWAQL$AAa-NH2 | | 1715.93 | 1138.57 | 1716.94 | 858.97 | 572.98 |
| SP588 | Ac-LTF$r8EYWAQL$Aa-NH2 | | 1644.89 | 1144.98 | 1645.9 | 823.45 | 549.3 |
| SP589 | Ac-LTF$r8EYWAQL$a-NH2 | | 1573.85 | 1113.71 | 1574.86 | 787.93 | 525.62 |
| SP590 | Ac-LTF$r8EYWAQL$AAA-OH | | 1716.91 | 859.55 | 1717.92 | 859.46 | 573.31 |
| SP591 | Ac-LTF$r8EYWAQL$A-OH | | 1574.84 | 975.14 | 1575.85 | 788.43 | 525.95 |
| SP592 | Ac-LTF$r8EYWAQL$AAA-NH2 | | 1715.93 | 904.75 | 1716.94 | 858.97 | 572.98 |
| SP593 | Ac-LTF$r8EYWAQCba$SAA-OH | | 1744.91 | 802.49 | 1745.92 | 873.46 | 582.64 |
| SP594 | Ac-LTF$r8EYWAQCba$S-OH | | 1602.83 | 913.53 | 1603.84 | 802.42 | 535.28 |
| SP595 | Ac-LTF$r8EYWAQCba$S-NH2 | | 1601.85 | 979.58 | 1602.86 | 801.93 | 534.96 |
| SP596 | 4-FBzl-LTF$r8EYWAQL$AAAAAa-NH2 | | 2009.05 | 970.52 | 2010.06 | 1005.53 | 670.69 |
| SP597 | 4-FBzl-LTF$r8EYWAQCba$SAA-NH2 | | 1823.93 | 965.8 | 1824.94 | 912.97 | 608.98 |
| SP598 | Ac-LTF$r8RYWAQL$AAAAAa-NH2 | | 1956.1 | 988.28 | 1957.11 | 979.06 | 653.04 |
| SP599 | Ac-LTF$r8HYWAQL$AAAAAa-NH2 | | 1937.06 | 1003.54 | 1938.07 | 969.54 | 646.69 |
| SP600 | Ac-LTF$r8QYWAQL$AAAAAa-NH2 | | 1928.06 | 993.92 | 1929.07 | 965.04 | 643.69 |
| SP601 | Ac-LTF$r8CitYWAQL$AAAAAa-NH2 | | 1957.08 | 987 | 1958.09 | 979.55 | 653.37 |
| SP602 | Ac-LTF$r8GlaYWAQL$AAAAAa-NH2 | | 1973.03 | 983 | 1974.04 | 987.52 | 658.68 |
| SP603 | Ac-LTF$r8F4gYWAQL$AAAAAa-NH2 | | 2004.1 | 937.86 | 2005.11 | 1003.06 | 669.04 |
| SP604 | Ac-LTF$r82mRYWAQL$AAAAAa-NH2 | | 1984.13 | 958.58 | 1985.14 | 993.07 | 662.38 |
| SP605 | Ac-LTF$r8ipKYWAQL$AAAAAa-NH2 | | 1970.14 | 944.52 | 1971.15 | 986.08 | 657.72 |
| SP606 | Ac-LTF$r8F4NH2YWAQL$AAAAAa-NH2 | | 1962.08 | 946 | 1963.09 | 982.05 | 655.03 |
| SP607 | Ac-LTF$r8EYWAAL$AAAAAa-NH2 | | 1872.02 | 959.32 | 1873.03 | 937.02 | 625.01 |
| SP608 | Ac-LTF$r8EYWALL$AAAAAa-NH2 | | 1914.07 | 980.88 | 1915.08 | 958.04 | 639.03 |
| SP609 | Ac-LTF$r8EYWAAibL$AAAAAa-NH2 | | 1886.03 | 970.61 | 1887.04 | 944.02 | 629.68 |
| SP610 | Ac-LTF$r8EYWASL$AAAAAa-NH2 | | 1888.01 | 980.51 | 1889.02 | 945.01 | 630.34 |
| SP611 | Ac-LTF$r8EYWANL$AAAAAa-NH2 | | 1915.02 | 1006.41 | 1916.03 | 958.52 | 639.35 |
| SP612 | Ac-LTF$r8EYWACitL$AAAAAa-NH2 | | 1958.07 | | 1959.08 | 980.04 | 653.7 |
| SP613 | Ac-LTF$r8EYWAHL$AAAAAa-NH2 | | 1938.04 | 966.24 | 1939.05 | 970.03 | 647.02 |
| SP614 | Ac-LTF$r8EYWARL$AAAAAa-NH2 | | 1957.08 | | 1958.09 | 979.55 | 653.37 |
| SP615 | Ac-LTF$r8EpYWAQL$AAAAAa-NH2 | | 2009.01 | | 2010.02 | 1005.51 | 670.68 |
| SP616 | Cbm-LTF$r8EYWAQCba$SAA-NH2 | | 1590.85 | | 1591.86 | 796.43 | 531.29 |
| SP617 | Cbm-LTF$r8EYWAQL$AAAAAa-NH2 | | 1930.04 | | 1931.05 | 966.03 | 644.35 |
| SP618 | Ac-LTF$r8EYWAQL$SAAAAa-NH2 | | 1945.04 | 1005.11 | 1946.05 | 973.53 | 649.35 |
| SP619 | Ac-LTF$r8EYWAQL$AAAASa-NH2 | | 1945.04 | 986.52 | 1946.05 | 973.53 | 649.35 |
| SP620 | Ac-LTF$r8EYWAQL$SAAASa-NH2 | | 1961.03 | 993.27 | 1962.04 | 981.52 | 654.68 |
| SP621 | Ac-LTF$r8EYWAQTba$AAAAAa-NH2 | | 1943.06 | 983.1 | 1944.07 | 972.54 | 648.69 |
| SP622 | Ac-LTF$r8EYWAQAdm$AAAAAa-NH2 | | 2007.09 | 990.31 | 2008.1 | 1004.55 | 670.04 |
| SP623 | Ac-LTF$r8EYWAQCha$AAAAAa-NH2 | | 1969.07 | 987.17 | 1970.08 | 985.54 | 657.36 |
| SP624 | Ac-LTF$r8EYWAQhCha$AAAAAa-NH2 | | 1983.09 | 1026.11 | 1984.1 | 992.55 | 662.04 |
| SP625 | Ac-LTF$r8EYWAQF$AAAAAa-NH2 | | 1963.02 | 957.01 | 1964.03 | 982.52 | 655.35 |
| SP626 | Ac-LTF$r8EYWAQhF$AAAAAa-NH2 | | 1977.04 | 1087.81 | 1978.05 | 989.53 | 660.02 |
| SP627 | Ac-LTF$r8EYWAQL$AANleAAa-NH2 | | 1971.09 | 933.45 | 1972.1 | 986.55 | 658.04 |
| SP628 | Ac-LTF$r8EYWAQAdm$AANleAAa-NH2 | | 2049.13 | 1017.97 | 2050.14 | 1025.57 | 684.05 |
| SP629 | 4-FBz-BaLTF$r8EYWAQL$AAAAAa-NH2 | | 2080.08 | | 2081.09 | 1041.05 | 694.37 |
| SP630 | 4-FBz-BaLTF$r8EYWAQCba$SAA-NH2 | | 1894.97 | | 1895.98 | 948.49 | 632.66 |
| SP631 | Ac-LTF$r5EYWAQL$s8AAAAAa-NH2 | | 1929.04 | 1072.68 | 1930.05 | 965.53 | 644.02 |
| SP632 | Ac-LTF$r5EYWAQCba$s8SAA-NH2 | | 1743.92 | 1107.79 | 1744.93 | 872.97 | 582.31 |
| SP633 | Ac-LTF$r8EYWAQL$AAhhLAAa-NH2 | | 1999.12 | | 2000.13 | 1000.57 | 667.38 |
| SP634 | Ac-LTF$r8EYWAQL$AAAAAAAa-NH2 | | 2071.11 | | 2072.12 | 1036.56 | 691.38 |
| SP635 | Ac-LTF$r8EYWAQL$AAAAAAAAa-NH2 | | 2142.15 | 778.1 | 2143.16 | 1072.08 | 715.06 |
| SP636 | Ac-LTF$r8EYWAQL$AAAAAAAAAa-NH2 | | 2213.19 | 870.53 | 2214.2 | 1107.6 | 738.74 |
| SP637 | Ac-LTA$r8EYAAQCba$SAA-NH2 | | 1552.85 | | 1553.86 | 777.43 | 518.62 |
| SP638 | Ac-LTA$r8EYAAQL$AAAAAa-NH2 | | 1737.97 | 779.45 | 1738.98 | 869.99 | 580.33 |
| SP639 | Ac-LTF$r8EPmpWAQL$AAAAAa-NH2 | | 2007.03 | 779.54 | 2008.04 | 1004.52 | 670.02 |
| SP640 | Ac-LTF$r8EPmpWAQCba$SAA-NH2 | | 1821.91 | 838.04 | 1822.92 | 911.96 | 608.31 |
| SP641 | Ac-ATF$r8HYWAQL$S-NH2 | | 1555.82 | 867.83 | 1556.83 | 778.92 | 519.61 |
| SP642 | Ac-LTF$r8HAWAQL$S-NH2 | | 1505.84 | 877.91 | 1506.85 | 753.93 | 502.95 |
| SP643 | Ac-LTF$r8HYWAQA$S-NH2 | | 1555.82 | 852.52 | 1556.83 | 778.92 | 519.61 |
| SP644 | Ac-LTF$r8EYWAQCba$SA-NH2 | | 1672.89 | 887.18 | 1673.9 | 837.45 | 558.64 |
| SP645 | Ac-LTF$r8EYWAQL$SAA-NH2 | | 1731.92 | 873.32 | 1732.93 | 866.97 | 578.31 |
| SP646 | Ac-LTF$r8HYWAQCba$SAA-NH2 | | 1751.94 | 873.05 | 1752.95 | 876.98 | 584.99 |
| SP647 | Ac-LTF$r8SYWAQCba$SAA-NH2 | | 1701.91 | 844.88 | 1702.92 | 851.96 | 568.31 |
| SP648 | Ac-LTF$r8RYWAQCba$SAA-NH2 | | 1770.98 | 865.58 | 1771.99 | 886.5 | 591.33 |
| SP649 | Ac-LTF$r8KYWAQCba$SAA-NH2 | | 1742.98 | 936.57 | 1743.99 | 872.5 | 582 |
| SP650 | Ac-LTF$r8QYWAQCba$SAA-NH2 | | 1742.94 | 930.93 | 1743.95 | 872.48 | 581.99 |
| SP651 | Ac-LTF$r8EYWAACba$SAA-NH2 | | 1686.9 | 1032.45 | 1687.91 | 844.46 | 563.31 |
| SP652 | Ac-LTF$r8EYWAQCba$AAA-NH2 | | 1727.93 | 895.46 | 1728.94 | 864.97 | 576.98 |
| SP653 | Ac-LTF$r8EYWAQL$AAAAA-OH | | 1858.99 | 824.54 | 1860 | 930.5 | 620.67 |
| SP654 | Ac-LTF$r8EYWAQL$AAAA-OH | | 1787.95 | 894.48 | 1788.96 | 894.98 | 596.99 |
| SP655 | Ac-LTF$r8EYWAQL$AA-OH | | 1645.88 | 856 | 1646.89 | 823.95 | 549.63 |
| SP656 | Ac-LTF$r8AF4bOH2WAQL$AAAAAa-NH2 | | | | | | |
| SP657 | Ac-LTF$r8AF4bOH2WAAL$AAAAAa-NH2 | | | | | | |
| SP658 | Ac-LTF$r8EF4bOH2WAQCba$SAA-NH2 | | | | | | |
| SP659 | Ac-LTF$r8ApYWAQL$AAAAAa-NH2 | | | | | | |
| SP660 | Ac-LTF$r8ApYWAAL$AAAAAa-NH2 | | | | | | |
| SP661 | Ac-LTF$r8EpYWAQCba$SAA-NH2 | | | | | | |
| SP662 | Ac-LTF$rda6AYWAQL$da5AAAAAa-NH2 | | 1974.06 | 934.44 | | | |
| SP663 | Ac-LTF$rda6EYWAQCba$da5SAA-NH2 | | 1846.95 | 870.52 | | 869.94 | |
| SP664 | Ac-LTF$rda6EYWAQL$da5AAAAAa-NH2 | | | | | | |
| SP665 | Ac-LTF$ra9EYWAQL$a6AAAAAa-NH2 | | | 936.57 | | 935.51 | |
| SP666 | Ac-LTF$ra9EYWAQL$a6AAAAAa-NH2 | | | | | | |
| SP667 | Ac-LTF$ra9EYWAQCba$a6SAA-NH2 | | | | | | |
| SP668 | Ac-LTA$ra9EYWAQCba$a6SAA-NH2 | | | | | | |
| SP669 | 5-FAM-BaLTF$ra9EYWAQCba$a6SAA-NH2 | | | | | | |
| SP670 | 5-FAM-BaLTF$r8EYWAQL$AAAAAa-NH2 | | 2316.11 | | | | |
| SP671 | 5-FAM-BaLTF$/r8EYWAQL$/AAAAAa-NH2 | | 2344.15 | | | | |
| SP672 | 5-FAM-BaLTA$r8EYWAQL$AAAAAa-NH2 | | 2240.08 | | | | |
| SP673 | 5-FAM-BaLTF$r8AYWAQL$AAAAAa-NH2 | | 2258.11 | | | | |
| SP674 | 5-FAM-BaATF$r8EYWAQL$AAAAAa-NH2 | | 2274.07 | | | | |
| SP675 | 5-FAM-BaLAF$r8EYWAQL$AAAAAa-NH2 | | 2286.1 | | | | |
| SP676 | 5-FAM-BaLTF$r8EAWAQL$AAAAAa-NH2 | | 2224.09 | | | | |
| SP677 | 5-FAM-BaLTF$r8EYAAQL$AAAAAa-NH2 | | 2201.07 | | | | |
| SP678 | 5-FAM-BaLTA$r8EYAAQL$AAAAAa-NH2 | | 2125.04 | | | | |
| SP679 | 5-FAM-BaLTF$r8EYWAAL$AAAAAa-NH2 | | 2259.09 | | | | |
| SP680 | 5-FAM-BaLTF$r8EYWAQA$AAAAAa-NH2 | | 2274.07 | | | | |
| SP681 | 5-FAM-BaLTF$/r8EYWAQCba$/SAA-NH2 | | 2159.03 | | | | |
| SP682 | 5-FAM-BaLTA$r8EYWAQCba$SAA-NH2 | | 2054.97 | | | | |
| SP683 | 5-FAM-BaLTF$r8EYAAQCba$SAA-NH2 | | 2015.96 | | | | |
| SP684 | 5-FAM-BaLTA$r8EYAAQCba$SAA-NH2 | | 1939.92 | | | | |
| SP685 | 5-FAM-BaQSQQTF$r8NLWRLL$QN-NH2 | | 2495.23 | | | | |
| SP686 | 5-TAMRA-BaLTF$r8EYWAQCba$SAA-NH2 | | 2186.1 | | | | |
| SP687 | 5-TAMRA-BaLTA$r8EYWAQCba$SAA-NH2 | | 2110.07 | | | | |
| SP688 | 5-TAMRA-BaLTF$r8EYAAQCba$SAA-NH2 | | 2071.06 | | | | |
| SP689 | 5-TAMRA-BaLTA$r8EYAAQCba$SAA-NH2 | | 1995.03 | | | | |
| SP690 | 5-TAMRA-BaLTF$/r8EYWAQCba$/SAA-NH2 | | 2214.13 | | | | |
| SP691 | 5-TAMRA-BaLTF$r8EYWAQL$AAAAAa-NH2 | | 2371.22 | | | | |
| SP692 | 5-TAMRA-BaLTA$r8EYWAQL$AAAAAa-NH2 | | 2295.19 | | | | |
| SP693 | 5-TAMRA-BaLTF$/r8EYWAQL$/AAAAAa-NH2 | | 2399.25 | | | | |
| SP694 | Ac-LTF$r8EYWCou7QCba$SAA-OH | | 1947.93 | | | | |
| SP695 | Ac-LTF$r8EYWCou7QCba$S-OH | | 1805.86 | | | | |
| SP696 | Ac-LTA$r8EYWCou7QCba$SAA-NH2 | | 1870.91 | | | | |
| SP697 | Ac-LTF$r8EYACou7QCba$SAA-NH2 | | 1831.9 | | | | |
| SP698 | Ac-LTA$r8EYACou7QCba$SAA-NH2 | | 1755.87 | | | | |
| SP699 | Ac-LTF$/r8EYWCou7QCba$/SAA-NH2 | | 1974.98 | | | | |
| SP700 | Ac-LTF$r8EYWCou7QL$AAAAAa-NH2 | | 2132.06 | | | | |
| SP701 | Ac-LTF$/r8EYWCou7QL$/AAAAAa-NH2 | | 2160.09 | | | | |
| SP702 | Ac-LTF$r8EYWCou7QL$AAAAA-OH | | 2062A01 | | | | |
| SP703 | Ac-LTF$r8EYWCou7QL$AAAA-OH | | 1990.97 | | | | |
| SP704 | Ac-LTF$r8EYWCou7QL$AAA-OH | | 1919.94 | | | | |
| SP705 | Ac-LTF$r8EYWCou7QL$AA-OH | | 1848.9 | | | | |
| SP706 | Ac-LTF$r8EYWCou7QL$A-OH | | 1777.86 | | | | |
| SP707 | Ac-LTF$r8EYWAQL$AAAASa-NH2 | iso2 | | 974.4 | | 973.53 | |
| SP708 | Ac-LTF$r8AYWAAL$AAAAAa-NH2 | iso2 | 1814.01 | 908.82 | 1815.02 | 908.01 | 605.68 |
| SP709 | Biotin-BaLTF$r8EYWAQL$AAAAAa-NH2 | | 2184.14 | 1093.64 | 2185.15 | 1093.08 | 729.05 |
| SP710 | Ac-LTF$r8HAWAQL$S-NH2 | iso2 | 1505.84 | 754.43 | 1506.85 | 753.93 | 502.95 |
| SP711 | Ac-LTF$r8EYWAQCba$SA-NH2 | iso2 | 1672.89 | 838.05 | 1673.9 | 837.45 | 558.64 |
| SP712 | Ac-LTF$r8HYWAQCba$SAA-NH2 | iso2 | 1751.94 | 877.55 | 1752.95 | 876.98 | 584.99 |
| SP713 | Ac-LTF$r8SYWAQCba$SAA-NH2 | iso2 | 1701.91 | 852.48 | 1702.92 | 851.96 | 568.31 |
| SP714 | Ac-LTF$r8RYWAQCba$SAA-NH2 | iso2 | 1770.98 | 887.45 | 1771.99 | 886.5 | 591.33 |
| SP715 | Ac-LTF$r8KYWAQCba$SAA-NH2 | iso2 | 1742.98 | 872.92 | 1743.99 | 872.5 | 582 |
| SP716 | Ac-LTF$r8EYWAQCba$AAA-NH2 | iso2 | 1727.93 | 865.71 | 1728.94 | 864.97 | 576.98 |
| SP717 | Ac-LTF$r8EYWAQL$AAAAAaBaC-NH2 | | 2103.09 | 1053.12 | 2104.1 | 1052.55 | 702.04 |
| SP718 | Ac-LTF$r8EYWAQL$AAAAAadPeg4C-NH2 | | 2279.19 | 1141.46 | 2280.2 | 1140.6 | 760.74 |
| SP719 | Ac-LTA$r8AYWAAL$AAAAAa-NH2 | | 1737.98 | 870.43 | 1738.99 | 870 | 580.33 |
| SP720 | Ac-LTF$r8AYAAAL$AAAAAa-NH2 | | 1698.97 | 851 | 1699.98 | 850.49 | 567.33 |
| SP721 | 5-FAM-BaLTF$r8AYWAAL$AAAAAa-NH2 | | 2201.09 | 1101.87 | 2202.1 | 1101.55 | 734.7 |
| SP722 | Ac-LTA$r8AYWAQL$AAAAAa-NH2 | | 1795 | 898.92 | 1796.01 | 898.51 | 599.34 |
| SP723 | Ac-LTF$r8AYAAQL$AAAAAa-NH2 | | 1755.99 | 879.49 | 1757 | 879 | 586.34 |
| SP724 | Ac-LTF$rda6AYWAAL$da5AAAAAa-NH2 | | 1807.97 | | 1808.98 | 904.99 | 603.66 |
| SP725 | FITC-BaLTF$r8EYWAQL$AAAAAa-NH2 | | 2347.1 | 1174.49 | 2348.11 | 1174.56 | 783.37 |
| SP726 | FITC-BaLTF$r8EYWAQCba$SAA-NH2 | | 2161.99 | 1082.35 | 2163 | 1082 | 721.67 |
| SP733 | Ac-LTF$r8EYWAQL$EAAAAa-NH2 | | 1987.05 | 995.03 | 1988.06 | 994.53 | 663.36 |
| SP734 | Ac-LTF$r8AYWAQL$EAAAAa-NH2 | | 1929.04 | 966.35 | 1930.05 | 965.53 | 644.02 |
| SP735 | Ac-LTF$r8EYWAQL$AAAAAaBaKbio-NH2 | | 2354.25 | 1178.47 | 2355.26 | 1178.13 | 785.76 |
| SP736 | Ac-LTF$r8AYWAAL$AAAAAa-NH2 | | 1814.01 | 908.45 | 1815.02 | 908.01 | 605.68 |
| SP737 | Ac-LTF$r8AYAAAL$AAAAAa-NH2 | iso2 | 1698.97 | 850.91 | 1699.98 | 850.49 | 567.33 |
| SP738 | Ac-LTF$r8AYAAQL$AAAAAa-NH2 | iso2 | 1755.99 | 879.4 | 1757 | 879 | 586.34 |
| SP739 | Ac-LTF$r8EYWAQL$EAAAAa-NH2 | iso2 | 1987.05 | 995.21 | 1988.06 | 994.53 | 663.36 |
| SP740 | Ac-LTF$r8AYWAQL$EAAAAa-NH2 | iso2 | 1929.04 | 966.08 | 1930.05 | 965.53 | 644.02 |
| SP741 | Ac-LTF$r8EYWAQCba$SAAAAa-NH2 | | 1957.04 | 980.04 | 1958.05 | 979.53 | 653.35 |
| SP742 | Ac-LTF$r8EYWAQLStAAA$r5AA-NH2 | | 2023.12 | 1012.83 | 2024.13 | 1012.57 | 675.38 |
| SP743 | Ac-LTF$r8EYWAQL$A$AAA$A-NH2 | | 2108.17 | 1055.44 | 2109.18 | 1055.09 | 703.73 |
| SP744 | Ac-LTF$r8EYWAQL$AA$AAA$A-NH2 | | 2179.21 | 1090.77 | 2180.22 | 1090.61 | 727.41 |
| SP745 | Ac-LTF$r8EYWAQL$AAA$AAA$A-NH2 | | 2250.25 | 1126.69 | 2251.26 | 1126.13 | 751.09 |
| SP746 | Ac-AAALTF$r8EYWAQL$AAA-OH | | 1930.02 | | 1931.03 | 966.02 | 644.35 |
| SP747 | Ac-AAALTF$r8EYWAQL$AAA-NH2 | | 1929.04 | 965.85 | 1930.05 | 965.53 | 644.02 |
| SP748 | Ac-AAAALTF$r8EYWAQL$AAA-NH2 | | 2000.08 | 1001.4 | 2001.09 | 1001.05 | 667.7 |
| SP749 | Ac-AAAAALTF$r8EYWAQL$AAA-NH2 | | 2071.11 | 1037.13 | 2072.12 | 1036.56 | 691.38 |
| SP750 | Ac-AAAAAALTF$r8EYWAQL$AAA-NH2 | | 2142.15 | | 2143.16 | 1072.08 | 715.06 |
| SP751 | Ac-LTF$rda6EYWAQCba$da6SAA-NH2 | iso2 | 1751.89 | 877.36 | 1752.9 | 876.95 | 584.97 |
| SP752 | Ac-t$r5wya$r5f4CF3ekllr-NH2 | | | 844.25 | | | |
| SP753 | Ac-tawy$r5nf4CF3e$r5llr-NH2 | | | 837.03 | | | |
| SP754 | Ac-tawya$r5f4CF3ek$r5lr-NH2 | | | 822.97 | | | |
| SP755 | Ac-tawyanf4CF3e$r5llr$r5a-NH2 | | | 908.35 | | | |
| SP756 | Ac-t$s8wyanf4CF3e$r5llr-NH2 | | | 858.03 | | | |
| SP757 | Ac-tawy$s8nf4CF3ekll$r5a-NH2 | | | 879.86 | | | |
| SP758 | Ac-tawya$s8f4CF3ekllr$r5a-NH2 | | | 936.38 | | | |
| SP759 | Ac-tawy$s8naekll$r5a-NH2 | | | 844.25 | | | |
| SP760 | 5-FAM-Batawy$s8nf4CF3ekll$r5a-NH2 | | | | | | |
| SP761 | 5-FAM-Batawy$s8naekll$r5a-NH2 | | | | | | |
| SP762 | Ac-tawy$s8nf4CF3eall$r5a-NH2 | | | | | | |
| SP763 | Ac-tawy$s8nf4CF3ekll$r5aaaaa-NH2 | | | | | | |
| SP764 | Ac-tawy$s8nf4CF3eall$r5aaaaa-NH2 | | | | | | |

[0396] Table 1a shows a selection of peptidomimetic macrocycles.

TABLE 1a

| | | | Exact | Found | Calc | Calc | Calc |
|---|---|---|---|---|---|---|---|
| SP | Sequence | Isomer | Mass | Mass | (M + 1)/1 | (M + 2)/2 | (M + 3)/3 |
| SP244 | Ac-LTF$r8EF4coohWAQCba$SANleA-NH2 | | 1885 | 943.59 | 1886.01 | 943.51 | 629.34 |
| SP331 | Ac-LTF$r8EYWAQL$AAAAAa-NH2 | iso2 | 1929.04 | 966.08 | 1930.05 | 965.53 | 644.02 |
| SP555 | Ac-LTF$r8EY6clWAQL$AAAAAa-NH2 | | 1963 | 983.28 | 1964.01 | 982.51 | 655.34 |
| SP557 | Ac-AAALTF$r8EYWAQL$AAAAAa-NH2 | | 2142.15 | 1072.83 | 2143.16 | 1072.08 | 715.06 |
| SP558 | Ac-LTF34F2$r8EYWAQL$AAAAAa-NH2 | | 1965.02 | 984.3 | 1966.03 | 983.52 | 656.01 |
| SP562 | Ac-LTF$r8EYWAQL$AAibAAAa-NH2 | | 1943.06 | 973.11 | 1944.07 | 972.54 | 648.69 |
| SP564 | Ac-LTF$r8EYWAQL$AAAAibAa-NH2 | | 1943.06 | 973.48 | 1944.07 | 972.54 | 648.69 |
| SP566 | Ac-LTF$r8EYWAQL$AAAAAiba-NH2 | iso2 | 1943.06 | 973.38 | 1944.07 | 972.54 | 648.69 |
| SP567 | Ac-LTF$r8EYWAQL$AAAAAAib-NH2 | | 1943.06 | 973.01 | 1944.07 | 972.54 | 648.69 |
| SP572 | Ac-LTF$r8EYWAQL$AAAAaa-NH2 | | 1929.04 | 966.35 | 1930.05 | 965.53 | 644.02 |
| SP573 | Ac-LTF$r8EYWAQL$AAAAAA-NH2 | | 1929.04 | 966.35 | 1930.05 | 965.53 | 644.02 |
| SP578 | Ac-LTF$r8EYWAQL$AAAAASar-NH2 | | 1929.04 | 966.08 | 1930.05 | 965.53 | 644.02 |
| SP551 | Ac-LTF$r8EYWAQL$AAAAAa-OH | iso2 | 1930.02 | 965.89 | 1931.03 | 966.02 | 644.35 |
| SP662 | Ac-LTF$rda6AYWAQL$da5AAAAAa-NH2 | | 1974.06 | 934.44 | | 933.49 | |
| SP367 | 5-FAM-BaLTF$r8EYWAQCba$SAA-NH2 | | 2131 | 1067.09 | 2132.01 | 1066.51 | 711.34 |
| SP349 | Ac-LTF$r8EF4coohWAQCba$AAAAAa-NH2 | iso2 | 1969.04 | 986.06 | 1970.05 | 985.53 | 657.35 |
| SP347 | Ac-LTF$r8EYWAQCba$AAAAAa-NH2 | iso2 | 1941.04 | 972.55 | 1942.05 | 971.53 | 648.02 |

[0397] Table 1b shows a further selection of peptidomimetic macrocycles.

TABLE 1b

| | | | Exact | Found | Calc | Calc | Calc |
|---|---|---|---|---|---|---|---|
| SP | Sequence | Isomer | Mass | Mass | (M + 1)/1 | (M + 2)/2 | (M + 3)/3 |
| SP581 | Ac-TF$r8EYWAQL$AAAAAa-NH2 | | 1815.96 | 929.85 | 1816.97 | 908.99 | 606.33 |
| SP582 | Ac-F$r8EYWAQL$AAAAAa-NH2 | | 1714.91 | 930.92 | 1715.92 | 858.46 | 572.64 |
| SP583 | Ac-LVF$r8EYWAQL$AAAAAa-NH2 | | 1927.06 | 895.12 | 1928.07 | 964.54 | 643.36 |
| SP584 | Ac-AAF$r8EYWAQL$AAAAAa-NH2 | | 1856.98 | 859.51 | 1857.99 | 929.5 | 620 |
| SP585 | Ac-LTF$r8EYWAQL$AAAAa-NH2 | | 1858 | 824.08 | 1859.01 | 930.01 | 620.34 |
| SP586 | Ac-LTF$r8EYWAQL$AAAa-NH2 | | 1786.97 | 788.56 | 1787.98 | 894.49 | 596.66 |
| SP587 | Ac-LTF$r8EYWAQL$AAa-NH2 | | 1715.93 | 1138.57 | 1716.94 | 858.97 | 572.98 |
| SP588 | Ac-LTF$r8EYWAQL$Aa-NH2 | | 1644.89 | 1144.98 | 1645.9 | 823.45 | 549.3 |
| SP589 | Ac-LTF$r8EYWAQL$a-NH2 | | 1573.85 | 1113.71 | 1574.86 | 787.93 | 525.62 |

[0398] In the sequences shown above and elsewhere, the following abbreviations are used: “Nle” represents norleucine, “Aib” represents 2-aminoisobutyric acid, “Ac” represents acetyl, and “Pr” represents propionyl Amino acids represented as “$” are alpha-Me S5-pentenyl-alanine olefin amino acids connected by an all-carbon crosslinker comprising one double bond Amino acids represented as “$r5” are alpha-Me R5-pentenyl-alanine olefin amino acids connected by an all-carbon comprising one double bond Amino acids represented as “$s8” are alpha-Me S8-octenyl-alanine olefin amino acids connected by an all-carbon crosslinker comprising one double bond Amino acids represented as “$r8” are alpha-Me R8-octenyl-alanine olefin amino acids connected by an all-carbon crosslinker comprising one double bond. “Ahx” represents an aminocyclohexyl linker. The crosslinkers are linear all-carbon crosslinker comprising eight or eleven carbon atoms between the alpha carbons of each amino acid Amino acids represented as “$/” are alpha-Me S5-pentenyl-alanine olefin amino acids that are not connected by any crosslinker Amino acids represented as “$/r5” are alpha-Me R5-pentenyl-alanine olefin amino acids that are not connected by any crosslinker Amino acids represented as “$/s8” are alpha-Me S8-octenyl-alanine olefin amino acids that are not connected by any crosslinker Amino acids represented as “$/r8” are alpha-Me R8-octenyl-alanine olefin amino acids that are not connected by any crosslinker Amino acids represented as “Amw” are alpha-Me tryptophan amino acids Amino acids represented as “Aml” are alpha-Me leucine amino acids Amino acids represented as “Amf” are alpha-Me phenylalanine amino acids. Amino acids represented as “2ff” are 2-fluoro-phenylalanine amino acids Amino acids represented as “3ff” are 3-fluoro-phenylalanine amino acids Amino acids represented as “St” are amino acids comprising two pentenyl-alanine olefin side chains, each of which is crosslinked to another amino acid as indicated Amino acids represented as “St//” are amino acids comprising two pentenyl-alanine olefin side chains that are not crosslinked Amino acids represented as “% St” are amino acids comprising two pentenyl-alanine olefin side chains, each of which is crosslinked to another amino acid as indicated via fully saturated hydrocarbon crosslinks. Amino acids represented as “Ba” are beta-alanine. The lower-case character “e” or “z” within the designation of a crosslinked amino acid (e.g. “$er8” or “$zr8”) represents the configuration of the double bond (E or Z, respectively). In other contexts, lower-case letters such as “a” or “f” represent D amino acids (e.g. D-alanine, or D-phenylalanine, respectively) Amino acids designated as “NmW” represent N-methyltryptophan Amino acids designated as “NmY” represent N-methyltyrosine. Amino acids designated as “NmA” represent N-methylalanine. “Kbio” represents a biotin group attached to the side chain amino group of a lysine residue Amino acids designated as “Sar” represent sarcosine. Amino acids designated as “Cha” represent cyclohexyl alanine Amino acids designated as “Cpg” represent cyclopentyl glycine Amino acids designated as “Chg” represent cyclohexyl glycine. Amino acids designated as “Cba” represent cyclobutyl alanine Amino acids designated as “F4I” represent 4-iodo phenylalanine. “7L” represents N15 isotopic leucine Amino acids designated as “F3Cl” represent 3-chloro phenylalanine Amino acids designated as “F4cooh” represent 4-carboxy phenylalanine. Amino acids designated as “F34F2” represent 3,4-difluoro phenylalanine Amino acids designated as “6clW” represent 6-chloro tryptophan Amino acids designated as “$rda6” represent alpha-Me R6-hexynyl-alanine alkynyl amino acids, crosslinked via a dialkyne bond to a second alkynyl amino acid Amino acids designated as “$da5” represent alpha-Me S5-pentynyl-alanine alkynyl amino acids, wherein the alkyne forms one half of a dialkyne bond with a second alkynyl amino acid Amino acids designated as “$ra9” represent alpha-Me R9-nonynyl-alanine alkynyl amino acids, crosslinked via an alkyne metathesis reaction with a second alkynyl amino acid Amino acids designated as “$a6” represent alpha-Me S6-hexynyl-alanine alkynyl amino acids, crosslinked via an alkyne metathesis reaction with a second alkynyl amino acid. The designation “iso1” or “iso2” indicates that the peptidomimetic macrocycle is a single isomer.

[0399] Amino acids designated as “Cit” represent citrulline Amino acids designated as “Cou4”, “Cou6”, “Cou7” and “Cou8”, respectively, represent the following structures:

[chemical structure]

[chemical structure]

[0400] In some embodiments, a peptidomimetic macrocycle is obtained in more than one isomer, for example due to the configuration of a double bond within the structure of the crosslinker (E vs Z). Such isomers can or can not be separable by conventional chromatographic methods. In some embodiments, one isomer has improved biological properties relative to the other isomer. In one embodiment, an E crosslinker olefin isomer of a peptidomimetic macrocycle has better solubility, better target affinity, better in vivo or in vitro efficacy, higher helicity, or improved cell permeability relative to its Z counterpart. In another embodiment, a Z crosslinker olefin isomer of a peptidomimetic macrocycle has better solubility, better target affinity, better in vivo or in vitro efficacy, higher helicity, or improved cell permeability relative to its E counterpart.

[0401] Table 1c shows exemplary peptidomimetic macrocycle:

TABLE 1c

| | Structure |
|---|---|
| SP154 | [chemical structure] Chemical Formula: C₈₇H₁₂₅N₁₇O₂₁ Exact Mass: 1743.92 Molecular Weight: 1745.02 Ac-L T F $er8 E YWAQCba $e SAA-NH2 |
| SP115 | [chemical structure] Chemical Formula: C₈₅H₁₂₅N₁₇O₁₉ Exact Mass: 1687.93 Molecular Weight: 1689.00 Ac-L T F $er8 AYWAQhL $e SAA-NH2 |
| SP114 | [chemical structure] Chemical Formula: C₈₅H₁₂₅N₁₇O₁₉ Exact Mass: 1687.93 Molecular Weight: 1689.00 Ac-L T F $zr8 AYWAQhL $z SAA-NH2 |
| SP99 | [chemical structure] Chemical Formula: C₈₄H₁₂₂ClN₁₇O₁₉ Exact Mass: 1707.88 Molecular Weight: 1709.42 Ac-L T F $er8 AY6clWAQL $e SAA-NH2 |
| SP388 | [chemical structure] Chemical Formula: C₉₁H₁₃₆N₁₈O₁₉ Exact Mass: 1785.02 Molecular Weight: 1786.16 Ac-L T F $er8 AYAmwAQL $e AA Nle A-NH2 |
| SP331 | [chemical structure] Chemical Formula: C₉₅H₁₄₀N₂₀O₂₃ Exact Mass: 1929.04 Molecular Weight: 1930.25 Ac-L T F $er8 EYWAQL $e AA A A A a-NH2 |
| SP445 | [chemical structure] Chemical Formula: C₉₅H₁₄₂N₂₀O₂₃ Exact Mass: 1931.06 Molecular Weight: 1932.26 Ac-L T F %r8 EYWAQL % AA A A A a-NH2 |
| SP351 | [chemical structure] Chemical Formula: C₉₆H₁₄₀N₂₀O₂₄ Exact Mass: 1957.03 Molecular Weight: 1958.26 Ac-L T F $er8 E YWSQCba $eA A A A A a-NH2 |
| SP71 | [chemical structure] Chemical Formula: C₉₀H₁₃₄N₁₈O₁₉ Exact Mass: 1771.01 Molecular Weight: 1772.14 Ac-L T F $er8 A YWAQL$e AA I a-NH2 |
| SP69 | [chemical structure] Chemical Formula: C₉₀H₁₃₄N₁₈O₁₉ Exact Mass: 1771.01 Molecular Weight: 1772.14 Ac-L T F $er8 AYWAQL $eAA Nle A-NH2 |
| SP7 | [chemical structure] Chemical Formula: C₉₀H₁₂₇N₁₇O₁₉ Exact Mass: 1749.95 Molecular Weight: 1751.07 Ac-L T F $r8 AYWAQL $ SA F-NH2 |
| SP160 | [chemical structure] Chemical Formula: C₈₇H₁₂₅F₂N₁₇O₂₁ Exact Mass: 1781.92 Molecular Weight: 1783.02 Ac-L T F34F2 $er8 EYWAQhL $e SAA-NH2 |
| SP315 | [chemical structure] Chemical Formula: C₉₃H₁₃₈N₂₀O₂₁ Exact Mass: 1871.03 Molecular Weight: 1872.21 Ac-L T F $er8 AYWAQL$eAA A A A a-NH2 |
| SP249 | [chemical structure] Chemical Formula: C₉₄H₁₃₆N₁₈O₂₂ Exact Mass: 1869.01 Molecular Weight: 1870.19 Ac-L T F $er8 E F4coohWAQCba $e AA-I-a-NH2 |
| SP437 | [chemical structure] Chemical Formula: C₉₅H₁₄₃N₂₁O₂₁ Exact Mass: 1914.08 Molecular Weight: 1915.28 Dmaac-L T F $er8 AYWAQL$eAA A A A a-NH2 |
| SP349 | [chemical structure] Chemical Formula: C₉₇H₁₄₀N₂₀O₂₄ Exact Mass: 1969.03 Molecular Weight: 1970.27 Ac-L T F $er8 E F4coohWAQCba$e A A A A A a-NH2 |
| SP555 | [chemical structure] Chemical Formula: C₉₅H₁₃₉ClN₂₀O₂₃ Exact Mass: 1963.00 Molecular Weight: 1964.69 Ac-L T F$er8 EY6clWAQL$eAA A A A a-NH2 |
| SP557 | [chemical structure] Chemical Formula: C₁₀₄H₁₅₅N₂₃O₂₆ Exact Mass: 2142.15 Molecular Weight: 2143.48 Ac-A A A L T F $er8 E YWAQL$e AA A A A a-NH2 |
| SP558 | [chemical structure] Chemical Formula: C₉₅H₁₃₈F₂N₂₀O₂₃ Exact Mass: 1965.02 Molecular Weight: 1966.23 Ac-L T F34F2 $er8 E YWAQL $e AAA AA a-NH2 |
| SP367 | [chemical structure] 5-FAM-Ba L T F $er8 EYWAQCba $e SAA-NH2 |
| SP562 | [chemical structure] Chemical Formula: C₉₆H₁₄₂N₂₀O₂₃ Exact Mass: 1943.06 Molecular Weight: 1944.27 Ac-LT F $er8 E YWAQL$eAAib A A A a-NH2 |
| SP564 | [chemical structure] Chemical Formula: C₉₆H₁₄₂N₂₀O₂₃ Exact Mass: 1943.06 Molecular Weight: 1944.27 Ac-L T F $er8 E YWAQL $e AA A Aib A a-NH2 |
| SP566 | [chemical structure] |
| SP567 | [chemical structure] Chemical Formula: C₉₆H₁₄₂N₂₀O₂₃ Exact Mass: 1943.06 Molecular Weight: 1944.27 Ac-L T F $er8 EYWAQL $e AA A A A Aib-NH2 |
| SP572 | [chemical structure] Chemical Formula: C₉₅H₁₄₀N₂₀O₂₃ Exact Mass: 1929.04 Molecular Weight: 1930.25 Ac-L T F $er8 E YWAQL $e AA A A a a-NH2 |
| SP573 | [chemical structure] Chemical Formula: C₉₅H₁₄₀N₂₀O₂₃ Exact Mass: 1929.04 Molecular Weight: 1930.25 Ac-L T F $er8 E YWAQL $eAA A A A A-NH2 |
| SP578 | [chemical structure] Chemical Formula: C₉₅H₁₄₀N₂₀O₂₃ Exact Mass: 1929.04 Molecular Weight: 1930.25 Ac-LT F $er8 E YWAQL$eAA A A A Sar-NH2 |
| SP664 | [chemical structure] Chemical Formula: C₉₅H₁₃₄N₂₀O₂₃ Exact Mass: 1922.99 Molecular Weight: 1924.20 Ac-LTF$rda6EYWAQL$da5AAAAAa-NH2 |
| SP662 | [chemical structure] Chemical Formula: C₉₅H₁₃₄N₂₀O₂₃ Exact Mass: 1922.99 Molecular Weight: 1924.20 Ac-L T F $rda6 E YWAQL$da5 AA A AA a-NH2 |
| | [chemical structure] Chemical Formula: C₉₆H₁₃₆N₂₀O₂₃ Exact Mass: 1937.01 Molecular Weight: 1938.23 |

[0402] In some embodiments, peptidomimetic macrocycles exclude peptidomimetic macrocycles shown in Table 2a:

TABLE 2a

| Number | Sequence |
|---|---|
| 1 | L$r5QETFSD$s8WKLLPEN |
| 2 | LSQ$r5TFSDLW$s8LLPEN |
| 3 | LSQE$r5FSDLWK$s8LPEN |
| 4 | LSQET$r5SDLWKL$s8PEN |
| 5 | LSQETF$r5DLWKLL$s8EN |
| 6 | LXQETFS$r5LWKLLP$s8N |
| 7 | LSQETFSD$r5WKLLPE$s8 |
| 8 | LSQQTF$r5DLWKLL$s8EN |
| 9 | LSQETF$r5DLWKLL$s8QN |
| 10 | LSQQTF$r5DLWKLL$s8QN |
| 11 | LSQETF$r5NLWKLL$s8QN |
| 12 | LSQQTF$r5NLWKLL$s8QN |
| 13 | LSQQTF$r5NLWRLL$s8QN |
| 14 | QSQQTF$r5NLWKLL$s8QN |
| 15 | QSQQTF$r5NLWRLL$s8QN |
| 16 | QSQQTA$r5NLWRLL$s8QN |
| 17 | L$r8QETFSD$WKLLPEN |
| 18 | LSQ$r8TFSDLW$LLPEN |
| 19 | LSQE$r8FSDLWK$LPEN |
| 20 | LSQET$r8SDLWKL$PEN |
| 21 | LSQETF$r8DLWKLL$EN |
| 22 | LXQETFS$r8LWKLLP$N |
| 23 | LSQETFSD$r8WKLLPE$ |
| 24 | LSQQTF$r8DLWKLL$EN |
| 25 | LSQETF$r8DLWKLL$QN |
| 26 | LSQQTF$r8DLWKLL$QN |
| 27 | LSQETF$r8NLWKLL$QN |
| 28 | LSQQTF$r8NLWKLL$QN |
| 29 | LSQQTF$r8NLWRLL$QN |
| 30 | QSQQTF$r8NLWKLL$QN |
| 31 | QSQQTF$r8NLWRLL$QN |
| 32 | QSQQTA$r8NLWRLL$QN |
| 33 | QSQQTF$r8NLWRKK$QN |
| 34 | QQTF$r8DLWRLL$EN |
| 35 | QQTF$r8DLWRLL$ |
| 36 | LSQQTF$DLW$LL |
| 37 | QQTF$DLW$LL |
| 38 | QQTA$r8DLWRLL$EN |
| 39 | QSQQTF$r5NLWRLL$s8QN |
| | (dihydroxylated olefin) |
| 40 | QSQQTA$r5NLWRLL$s8QN |
| | (dihydroxylated olefin) |
| 41 | QSQQTF$r8DLWRLL$QN |
| 42 | QTF$r8NLWRLL$ |
| 43 | QSQQTF$NLW$LLPQN |
| 44 | QS$QTF$NLWRLLPQN |
| 45 | $TFS$LWKLL |
| 46 | ETF$DLW$LL |
| 47 | QTF$NLW$LL |
| 48 | $SQE$FSNLWKLL |

In Table 2a, X represents S or any amino acid. Peptides shown can comprise an N-terminal capping group such as acetyl or an additional linker such as beta-alanine between the capping group and the start of the peptide sequence.

[0403] In some embodiments, peptidomimetic macrocycles do not comprise a peptidomimetic macrocycle structure as shown in Table 2a.

[0404] In other embodiments, peptidomimetic macrocycles exclude peptidomimetic macrocycles shown in Table 2b:

TABLE 2b

| | | Exact | | Observed |
|---|---|---|---|---|
| Number | Sequence | Mass | M + 2 | mass (m/e) |
| 1 | Ac-LSQETF$r8DLWKLL$EN-NH2 | 2068.13 | 1035.07 | 1035.36 |
| 2 | Ac-LSQETF$r8NLWKLL$QN-NH2 | 2066.16 | 1034.08 | 1034.31 |
| 3 | Ac-LSQQTF$r8NLWRLL$QN-NH2 | 2093.18 | 1047.59 | 1047.73 |
| 4 | Ac-QSQQTF$r8NLWKLL$QN-NH2 | 2080.15 | 1041.08 | 1041.31 |
| 5 | Ac-QSQQTF$r8NLWRLL$QN-NH2 | 2108.15 | 1055.08 | 1055.32 |
| 6 | Ac-QSQQTA$r8NLWRLL$QN-NH2 | 2032.12 | 1017.06 | 1017.24 |
| 7 | Ac-QAibQQTF$r8NLWRLL$QN-NH2 | 2106.17 | 1054.09 | 1054.34 |
| 8 | Ac-QSQQTFSNLWRLLPQN-NH2 | 2000.02 | 1001.01 | 1001.26 |
| 9 | Ac-QSQQTF$/r8NLWRLL$/QN-NH2 | 2136.18 | 1069.09 | 1069.37 |
| 10 | Ac-QSQAibTF$r8NLWRLL$QN-NH2 | 2065.15 | 1033.58 | 1033.71 |
| 11 | Ac-QSQQTF$r8NLWRLL$AN-NH2 | 2051.13 | 1026.57 | 1026.70 |
| 12 | Ac-ASQQTF$r8NLWRLL$QN-NH2 | 2051.13 | 1026.57 | 1026.90 |
| 13 | Ac-QSQQTF$r8ALWRLL$QN-NH2 | 2065.15 | 1033.58 | 1033.41 |
| 14 | Ac-QSQETF$r8NLWRLL$QN-NH2 | 2109.14 | 1055.57 | 1055.70 |
| 15 | Ac-RSQQTF$r8NLWRLL$QN-NH2 | 2136.20 | 1069.10 | 1069.17 |
| 16 | Ac-RSQQTF$r8NLWRLL$EN-NH2 | 2137.18 | 1069.59 | 1069.75 |
| 17 | Ac-LSQETFSDLWKLLPEN-NH2 | 1959.99 | 981.00 | 981.24 |
| 18 | Ac-QSQ$TFS$LWRLLPQN-NH2 | 2008.09 | 1005.05 | 1004.97 |
| 19 | Ac-QSQQ$FSN$WRLLPQN-NH2 | 2036.06 | 1019.03 | 1018.86 |
| 20 | Ac-QSQQT$SNL$RLLPQN-NH2 | 1917.04 | 959.52 | 959.32 |
| 21 | Ac-QSQQTF$NLW$LLPQN-NH2 | 2007.06 | 1004.53 | 1004.97 |
| 22 | Ac-RTQATF$r8NQWAibANle$TNAibTR-NH2 | 2310.26 | 1156.13 | 1156.52 |
| 23 | Ac-QSQQTF$r8NLWRLL$RN-NH2 | 2136.20 | 1069.10 | 1068.94 |
| 24 | Ac-QSQRTF$r8NLWRLL$QN-NH2 | 2136.20 | 1069.10 | 1068.94 |
| 25 | Ac-QSQQTF$r8NNleWRLL$QN-NH2 | 2108.15 | 1055.08 | 1055.44 |
| 26 | Ac-QSQQTF$r8NLWRNleL$QN-NH2 | 2108.15 | 1055.08 | 1055.84 |
| 27 | Ac-QSQQTF$r8NLWRLNle$QN-NH2 | 2108.15 | 1055.08 | 1055.12 |
| 28 | Ac-QSQQTY$r8NLWRLL$QN-NH2 | 2124.15 | 1063.08 | 1062.92 |
| 29 | Ac-RAibQQTF$r8NLWRLL$QN-NH2 | 2134.22 | 1068.11 | 1068.65 |
| 30 | Ac-MPRFMDYWEGLN-NH2 | 1598.70 | 800.35 | 800.45 |
| 31 | Ac-RSQQRF$r8NLWRLL$QN-NH2 | 2191.25 | 1096.63 | 1096.83 |
| 32 | Ac-QSQQRF$r8NLWRLL$QN-NH2 | 2163.21 | 1082.61 | 1082.87 |
| 33 | Ac-RAibQQRF$r8NLWRLL$QN-NH2 | 2189.27 | 1095.64 | 1096.37 |
| 34 | Ac-RSQQRF$r8NFWRLL$QN-NH2 | 2225.23 | 1113.62 | 1114.37 |
| 35 | Ac-RSQQRF$r8NYWRLL$QN-NH2 | 2241.23 | 1121.62 | 1122.37 |
| 36 | Ac-RSQQTF$r8NLWQLL$QN-NH2 | 2108.15 | 1055.08 | 1055.29 |
| 37 | Ac-QSQQTF$r8NLWQAmlL$QN-NH2 | 2094.13 | 1048.07 | 1048.32 |
| 38 | Ac-QSQQTF$r8NAmlWRLL$QN-NH2 | 2122.17 | 1062.09 | 1062.35 |
| 39 | Ac-NlePRF$r8DYWEGL$QN-NH2 | 1869.98 | 935.99 | 936.20 |
| 40 | Ac-NlePRF$r8NYWRLL$QN-NH2 | 1952.12 | 977.06 | 977.35 |
| 41 | Ac-RF$r8NLWRLL$Q-NH2 | 1577.96 | 789.98 | 790.18 |
| 42 | Ac-QSQQTF$r8N2ffWRLL$QN-NH2 | 2160.13 | 1081.07 | 1081.40 |
| 43 | Ac-QSQQTF$r8N3ffWRLL$QN-NH2 | 2160.13 | 1081.07 | 1081.34 |
| 44 | Ac-QSQQTF#r8NLWRLL#QN-NH2 | 2080.12 | 1041.06 | 1041.34 |
| 45 | Ac-RSQQTA$r8NLWRLL$QN-NH2 | 2060.16 | 1031.08 | 1031.38 |
| 46 | Ac-QSQQTF%r8NLWRLL%QN-NH2 | 2110.17 | 1056.09 | 1056.55 |
| 47 | HepQSQ$TFSNLWRLLPQN-NH2 | 2051.10 | 1026.55 | 1026.82 |
| 48 | HepQSQ$TF$r8NLWRLL$QN-NH2 | 2159.23 | 1080.62 | 1080.89 |
| 49 | Ac-QSQQjF$r8NL6clWRLL$QN-NH2 | 2142.11 | 1072.06 | 1072.35 |
| 50 | Ac-QSQQjF$r8NLMe6clwRLL$QN-NH2 | 2156.13 | 1079.07 | 1079.27 |
| 51 | Ac-LTFEHYWAQLTS-NH2 | 1535.74 | 768.87 | 768.91 |
| 52 | Ac-LTF$HYW$QLTS-NH2 | 1585.83 | 793.92 | 794.17 |
| 53 | Ac-LTFE$YWA$LTS-NH2 | 1520.79 | 761.40 | 761.67 |
| 54 | Ac-LTF$zr8HYWAQL$zS-NH2 | 1597.87 | 799.94 | 800.06 |
| 55 | Ac-LTF$r8HYWRQL$S-NH2 | 1682.93 | 842.47 | 842.72 |
| 56 | Ac-QS$QTFStNLWRLL$s8QN-NH2 | 2145.21 | 1073.61 | 1073.90 |
| 57 | Ac-QSQQTASNLWRLLPQN-NH2 | 1923.99 | 963.00 | 963.26 |
| 58 | Ac-QSQQTA$/r8NLWRLL$/QN-NH2 | 2060.15 | 1031.08 | 1031.24 |
| 59 | Ac-ASQQTF$/r8NLWRLL$/QN-NH2 | 2079.16 | 1040.58 | 1040.89 |
| 60 | Ac-$SQQ$FSNLWRLLAibQN-NH2 | 2009.09 | 1005.55 | 1005.86 |
| 61 | Ac-QS$QTF$NLWRLLAibQN-NH2 | 2023.10 | 1012.55 | 1012.79 |
| 62 | Ac-QSQQ$FSN$WRLLAibQN-NH2 | 2024.06 | 1013.03 | 1013.31 |
| 63 | Ac-QSQQTF$NLW$LLAibQN-NH2 | 1995.06 | 998.53 | 998.87 |
| 64 | Ac-QSQQTFS$LWR$LAibQN-NH2 | 2011.06 | 1006.53 | 1006.83 |
| 65 | Ac-QSQQTFSNLW$LLA$N-NH2 | 1940.02 | 971.01 | 971.29 |
| 66 | Ac-$/SQQ$/FSNLWRLLAibQN-NH2 | 2037.12 | 1019.56 | 1019.78 |
| 67 | Ac-QS$/QTF$/NLWRLLAibQN-NH2 | 2051.13 | 1026.57 | 1026.90 |
| 68 | Ac-QSQQ$/FSN$/WRLLAibQN-NH2 | 2052.09 | 1027.05 | 1027.36 |
| 69 | Ac-QSQQTF$/NLW$/LLAibQN-NH2 | 2023.09 | 1012.55 | 1013.82 |
| 70 | Ac-QSQ$TFS$LWRLLAibQN-NH2 | 1996.09 | 999.05 | 999.39 |
| 71 | Ac-QSQ$/TFS$/LWRLLAibQN-NH2 | 2024.12 | 1013.06 | 1013.37 |
| 72 | Ac-QS$/QTFSt//NLWRLL$/s8QN-NH2 | 2201.27 | 1101.64 | 1102.00 |
| 73 | Ac-$r8SQQTFS$LWRLLAibQN-NH2 | 2038.14 | 1020.07 | 1020.23 |
| 74 | Ac-QSQ$r8TFSNLW$LLAibQN-NH2 | 1996.08 | 999.04 | 999.32 |
| 75 | Ac-QSQQTFS$r8LWRLLA$N-NH2 | 2024.12 | 1013.06 | 1013.37 |
| 76 | Ac-QS$r5QTFStNLW$LLAibQN-NH2 | 2032.12 | 1017.06 | 1017.39 |
| 77 | Ac-$/r8SQQJFS$/LWRLLAibQN-NH2 | 2066.17 | 1034.09 | 1034.80 |
| 78 | Ac-QSQ$/r8TFSNLW$/LLAibQN-NH2 | 2024.11 | 1013.06 | 1014.34 |
| 79 | Ac-QSQQTFS$/r8LWRLLA$/N-NH2 | 2052.15 | 1027.08 | 1027.16 |
| 80 | Ac-QS$/r5QTFSt//NLW$/LLAibQN-NH2 | 2088.18 | 1045.09 | 1047.10 |
| 81 | Ac-QSQQTFSNLWRLLAibQN-NH2 | 1988.02 | 995.01 | 995.31 |
| 82 | Hep/QSQ$/TF$/r8NLWRLL$/QN-NH2 | 2215.29 | 1108.65 | 1108.93 |
| 83 | Ac-ASQQTF$r8NLRWLL$QN-NH2 | 2051.13 | 1026.57 | 1026.90 |
| 84 | Ac-QSQQjF$/r8NLWRLL$/Q-NH2 | 2022.14 | 1012.07 | 1012.66 |
| 85 | Ac-QSQQTF$r8NLWRLL$Q-NH2 | 1994.11 | 998.06 | 998.42 |
| 86 | Ac-AAARAA$r8AAARAA$AA-NH2 | 1515.90 | 758.95 | 759.21 |
| 87 | Ac-LTFEHYWAQLTSA-NH2 | 1606.78 | 804.39 | 804.59 |
| 88 | Ac-LTF$r8HYWAQL$SA-NH2 | 1668.90 | 835.45 | 835.67 |
| 89 | Ac-ASQQTFSNLWRLLPQN-NH2 | 1943.00 | 972.50 | 973.27 |
| 90 | Ac-QS$QTFStNLW$r5LLAibQN-NH2 | 2032.12 | 1017.06 | 1017.30 |
| 91 | Ac-QSQQTFAibNLWRLLAibQN-NH2 | 1986.04 | 994.02 | 994.19 |
| 92 | Ac-QSQQTFNleNLWRLLNleQN-NH2 | 2042.11 | 1022.06 | 1022.23 |
| 93 | Ac-QSQQTF$/r8NLWRLLAibQN-NH2 | 2082.14 | 1042.07 | 1042.23 |
| 94 | Ac-QSQQTF$/r8NLWRLLNleQN-NH2 | 2110.17 | 1056.09 | 1056.29 |
| 95 | Ac-QSQQTFAibNLWRLL$/QN-NH2 | 2040.09 | 1021.05 | 1021.25 |
| 96 | Ac-QSQQTFNleNLWRLL$/QN-NH2 | 2068.12 | 1035.06 | 1035.31 |
| 97 | Ac-QSQQTF%r8NL6clWRNleL%QN-NH2 | 2144.13 | 1073.07 | 1073.32 |
| 98 | Ac-QSQQTF%r8NLMe6clWRLL%QN-NH2 | 2158.15 | 1080.08 | 1080.31 |
| 101 | Ac-FNle$YWE$L-NH2 | 1160.63 | — | 1161.70 |
| 102 | Ac-F$r8AYWELL$A-NH2 | 1344.75 | — | 1345.90 |
| 103 | Ac-F$r8AYWQLL$A-NH2 | 1343.76 | — | 1344.83 |
| 104 | Ac-NlePRF$r8NYWELL$QN-NH2 | 1925.06 | 963.53 | 963.69 |
| 105 | Ac-NlePRF$r8DYWRLL$QN-NH2 | 1953.10 | 977.55 | 977.68 |
| 106 | Ac-NlePRF$r8NYWRLL$Q-NH2 | 1838.07 | 920.04 | 920.18 |
| 107 | Ac-NlePRF$r8NYWRLL$-NH2 | 1710.01 | 856.01 | 856.13 |
| 108 | Ac-QSQQTF$r8DLWRLL$QN-NH2 | 2109.14 | 1055.57 | 1055.64 |
| 109 | Ac-QSQQTF$r8NLWRLL$EN-NH2 | 2109.14 | 1055.57 | 1055.70 |
| 110 | Ac-QSQQTF$r8NLWRLL$QD-NH2 | 2109.14 | 1055.57 | 1055.64 |
| 111 | Ac-QSQQTF$r8NLWRLL$S-NH2 | 1953.08 | 977.54 | 977.60 |
| 112 | Ac-ESQQTF$r8NLWRLL$QN-NH2 | 2109.14 | 1055.57 | 1055.70 |
| 113 | Ac-LTF$r8NLWRNleL$Q-NH2 | 1635.99 | 819.00 | 819.10 |
| 114 | Ac-LRF$r8NLWRNleL$Q-NH2 | 1691.04 | 846.52 | 846.68 |
| 115 | Ac-QSQQTF$r8NWWRNleL$QN-NH2 | 2181.15 | 1091.58 | 1091.64 |
| 116 | Ac-QSQQTF$r8NLWRNleL$Q-NH2 | 1994.11 | 998.06 | 998.07 |
| 117 | Ac-QTF$r8NLWRNleL$QN-NH2 | 1765.00 | 883.50 | 883.59 |
| 118 | Ac-NlePRF$r8NWWRLL$QN-NH2 | 1975.13 | 988.57 | 988.75 |
| 119 | Ac-NlePRF$r8NWWRLL$A-NH2 | 1804.07 | 903.04 | 903.08 |
| 120 | Ac-TSFAEYWNLLNH2 | 1467.70 | 734.85 | 734.90 |
| 121 | Ac-QTF$r8HWWSQL$S-NH2 | 1651.85 | 826.93 | 827.12 |
| 122 | Ac-FM$YWE$L-NH2 | 1178.58 | — | 1179.64 |
| 123 | Ac-QTFEHWWSQLLS-NH2 | 1601.76 | 801.88 | 801.94 |
| 124 | Ac-QSQQTF$r8NLAmwRLNle$QN-NH2 | 2122.17 | 1062.09 | 1062.24 |
| 125 | Ac-FMAibY6clWEAc3cL-NH2 | 1130.47 | — | 1131.53 |
| 126 | Ac-FNle$Y6clWE$L-NH2 | 1194.59 | — | 1195.64 |
| 127 | Ac-F$zr8AY6clWEAc3cL$z-NH2 | 1277.63 | 639.82 | 1278.71 |
| 128 | Ac-F5r8AY6clWEAc3cL$A-NH2 | 1348.66 | — | 1350.72 |
| 129 | Ac-NlePRF$r8NY6clWRLL$QN-NH2 | 1986.08 | 994.04 | 994.64 |
| 130 | Ac-AF$r8AAWALA$A-NH2 | 1223.71 | — | 1224.71 |
| 131 | Ac-TF$r8AAWRLA$Q-NH2 | 1395.80 | 698.90 | 399.04 |
| 132 | Pr-TF$r8AAWRLA$Q-NH2 | 1409.82 | 705.91 | 706.04 |
| 133 | Ac-QSQQTF%r8NLWRNleL%QN-NH2 | 2110.17 | 1056.09 | 1056.22 |
| 134 | Ac-LTF%r8HYWAQL%SA-NH2 | 1670.92 | 836.46 | 836.58 |
| 135 | Ac-NlePRF%r8NYWRLL%QN-NH2 | 1954.13 | 978.07 | 978.19 |
| 136 | Ac-NlePRF%r8NY6clWRLL%QN-NH2 | 1988.09 | 995.05 | 995.68 |
| 137 | Ac-LTF%r8HY6clWAQL%S-NH2 | 1633.84 | 817.92 | 817.93 |
| 138 | Ac-QS%QTF%StNLWRLL%s8QN-NH2 | 2149.24 | 1075.62 | 1075.65 |
| 139 | Ac-LTF%r8HY6clWRQL%S-NH2 | 1718.91 | 860.46 | 860.54 |
| 140 | Ac-QSQQTF%r8NL6clWRLL%QN-NH2 | 2144.13 | 1073.07 | 1073.64 |
| 141 | Ac-%r8SQQTFS%LWRLLAibQN-NH2 | 2040.15 | 1021.08 | 1021.13 |
| 142 | Ac-LTF%r8HYWAQL%S-NH2 | 1599.88 | 800.94 | 801.09 |
| 143 | Ac-TSF%r8QYWNLL%P-NH2 | 1602.88 | 802.44 | 802.58 |
| 147 | Ac-LTFEHYWAQLTS-NH2 | 1535.74 | 768.87 | 769.5 |
| 152 | Ac-F$er8AY6clWEAc3cL$e-NH2 | 1277.63 | 639.82 | 1278.71 |
| 153 | Ac-AF5r8AAWALASA-NH2 | 1277.63 | 639.82 | 1277.84 |
| 154 | Ac-TF$r8AAWRLA$Q-NH2 | 1395.80 | 698.90 | 699.04 |
| 155 | Pr-TF$r8AAWRLA$Q-NH2 | 1409.82 | 705.91 | 706.04 |
| 156 | Ac-LTFSer8HYWAQLSeS-NH2 | 1597.87 | 799.94 | 800.44 |
| 159 | Ac-CCPGCCBaQSQQTF$r8NLWRLL$QN-NH2 | 2745.30 | 1373.65 | 1372.99 |
| 160 | Ac-CCPGCCBaQSQQTA$r8NLWRLL$QN-NH2 | 2669.27 | 1335.64 | 1336.09 |
| 161 | Ac-CCPGCCBaNlePRF$r8NYWRLL$QN-NH2 | 2589.26 | 1295.63 | 1296.2 |
| 162 | Ac-LTF$/r8HYWAQLS/S-NH2 | 1625.90 | 813.95 | 814.18 |
| 163 | Ac-F%r8HY6clWRAc3cL%-NH2 | 1372.72 | 687.36 | 687.59 |
| 164 | Ac-QTF%r8HWWSQL%S-NH2 | 1653.87 | 827.94 | 827.94 |
| 165 | Ac-LTA$r8HYWRQL$S-NH2 | 1606.90 | 804.45 | 804.66 |
| 166 | Ac-C4r8QQTFSN$WRLLAibQN-NH2 | 2080.12 | 1041.06 | 1041.61 |
| 167 | Ac-QSQQ$r8FSNLWRSLAibQN-NH2 | 2066.11 | 1034.06 | 1034.58 |
| 168 | Ac-F$r8AYWEAc3cL$A-NH2 | 1314.70 | 658.35 | 1315.88 |
| 169 | Ac-F$r8AYWEAc3cL$S-NH2 | 1330.70 | 666.35 | 1331.87 |
| 170 | Ac-F$r8AYWEAc3cL$Q-NH2 | 1371.72 | 686.86 | 1372.72 |
| 171 | Ac-F$r8AYWEAibL$S-NH2 | 1332.71 | 667.36 | 1334.83 |
| 172 | Ac-F$r8AYWEAL$S-NH2 | 1318.70 | 660.35 | 1319.73 |
| 173 | Ac-F$r8AYWEQL$S-NH2 | 1375.72 | 688.86 | 1377.53 |
| 174 | Ac-F$r8HYWEQL$S-NH2 | 1441.74 | 721.87 | 1443.48 |
| 175 | Ac-F$r8HYWAQL$S-NH2 | 1383.73 | 692.87 | 1385.38 |
| 176 | Ac-F$r8HYWAAc3cL$S-NH2 | 1338.71 | 670.36 | 1340.82 |
| 177 | Ac-F$r8HYWRAc3cL$S-NH2 | 1423.78 | 712.89 | 713.04 |
| 178 | Ac-F$r8AYWEAc3cL#A-NH2 | 1300.69 | 651.35 | 1302.78 |
| 179 | Ac-NlePTF%r8NYWRLL%QN-NH2 | 1899.08 | 950.54 | 950.56 |
| 180 | Ac-TF$r8AAWRAL$Q-NH2 | 1395.80 | 698.90 | 699.13 |
| 181 | Ac-TSF%r8HYWAQL%S-NH2 | 1573.83 | 787.92 | 787.98 |
| 184 | Ac-F%r8AY6clWEAc3cL%A-NH2 | 1350.68 | 676.34 | 676.91 |
| 185 | Ac-LTF$r8HYWAQI$S-NH2 | 1597.87 | 799.94 | 800.07 |
| 186 | Ac-LTF$r8HYWAQNle$S-NH2 | 1597.87 | 799.94 | 800.07 |
| 187 | Ac-LTF$r8HYWAQL$A-NH2 | 1581.87 | 791.94 | 792.45 |
| 188 | Ac-LTF$r8HYWAQL$Abu-NH2 | 1595.89 | 798.95 | 799.03 |
| 189 | Ac-LTF$r8HYWAbuQL$S-NH2 | 1611.88 | 806.94 | 807.47 |
| 190 | Ac-LTFSer8AYWAQLSeS-NH2 | 1531.84 | 766.92 | 766.96 |
| 191 | Ac-LAF5r8HYWAQL$S-NH2 | 1567.86 | 784.93 | 785.49 |
| 192 | Ac-LAF$r8AYWAQL$S-NH2 | 1501.83 | 751.92 | 752.01 |
| 193 | Ac-LTFSer8AYWAQLSeA-NH2 | 1515.85 | 758.93 | 758.97 |
| 194 | Ac-LAF5r8AYWAQL$A-NH2 | 1485.84 | 743.92 | 744.05 |
| 195 | Ac-LTF$r8NLWANleL$Q-NH2 | 1550.92 | 776.46 | 776.61 |
| 196 | Ac-LTF$r8NLWANleL$A-NH2 | 1493.90 | 747.95 | 1495.6 |
| 197 | Ac-LTF5r8ALWANleL$Q-NH2 | 1507.92 | 754.96 | 755 |
| 198 | Ac-LAF$r8NLWANleL$Q-NH2 | 1520.91 | 761.46 | 761.96 |
| 199 | Ac-LAF$r8ALWANleL$A-NH2 | 1420.89 | 711.45 | 1421.74 |
| 200 | Ac-A$r8AYWEAc3cL$A-NH2 | 1238.67 | 620.34 | 1239.65 |
| 201 | Ac-F$r8AYWEAc3cL$AA-NH2 | 1385.74 | 693.87 | 1386.64 |
| 202 | Ac-F$r8AYWEAc3cL$Abu-NH2 | 1328.72 | 665.36 | 1330.17 |
| 203 | Ac-F5r8AYWEAc3cL$Nle-NH2 | 1356.75 | 679.38 | 1358.22 |
| 204 | Ac-F5r5AYWEAc3cL$s8A-NH2 | 1314.70 | 658.35 | 1315.51 |
| 205 | Ac-FSAYWEAc3cL$r8A-NH2 | 1314.70 | 658.35 | 1315.66 |
| 206 | Ac-F5r8AYWEAc3cI$A-NH2 | 1314.70 | 658.35 | 1316.18 |
| 207 | Ac-F5r8AYWEAc3cNle$A-NH2 | 1314.70 | 658.35 | 1315.66 |
| 208 | Ac-F$r8AYWEAmlL$A-NH2 | 1358.76 | 680.38 | 1360.21 |
| 209 | Ac-F$r8AYWENleL$A-NH2 | 1344.75 | 673.38 | 1345.71 |
| 210 | Ac-F$r8AYWQAc3cL$A-NH2 | 1313.72 | 657.86 | 1314.7 |
| 211 | Ac-F$r8AYWAAc3cL$A-NH2 | 1256.70 | 629.35 | 1257.56 |
| 212 | Ac-F$r8AYWAbuAc3cL$A-NH2 | 1270.71 | 636.36 | 1272.14 |
| 213 | Ac-F$r8AYWNleAc3cL$A-NH2 | 1298.74 | 650.37 | 1299.67 |
| 214 | Ac-F$r8AbuYWEAc3cL$A-NH2 | 1328.72 | 665.36 | 1329.65 |
| 215 | Ac-F$r8NleYWEAc3cL$A-NH2 | 1356.75 | 679.38 | 1358.66 |
| 216 | 5-FAM-BaLTFEHYWAQLTS-NH2 | 1922.82 | 962.41 | 962.87 |
| 217 | 5-FAM-BaLTF%r8HYWAQL%S-NH2 | 1986.96 | 994.48 | 994.97 |
| 218 | Ac-LTF$r8HYWAQhL$S-NH2 | 1611.88 | 806.94 | 807 |
| 219 | Ac-LTF$r8HYWAQTle$S-NH2 | 1597.87 | 799.94 | 799.97 |
| 220 | Ac-LTF$r8HYWAQAdm$S-NH2 | 1675.91 | 838.96 | 839.09 |
| 221 | Ac-LTF$r8HYWAQhCha$S-NH2 | 1651.91 | 826.96 | 826.98 |
| 222 | Ac-LTF$r8HYWAQCha$S-NH2 | 1637.90 | 819.95 | 820.02 |
| 223 | Ac-LTF$r8HYWAc6cQL$S-NH2 | 1651.91 | 826.96 | 826.98 |
| 224 | Ac-LTF$r8HYWAc5cQL$S-NH2 | 1637.90 | 819.95 | 820.02 |
| 225 | Ac-LThF$r8HYWAQL$S-NH2 | 1611.88 | 806.94 | 807 |
| 226 | Ac-LTIgI$r8HYWAQL$S-NH2 | 1625.90 | 813.95 | 812.99 |
| 227 | Ac-LTF$r8HYWAQChg$S-NH2 | 1623.88 | 812.94 | 812.99 |
| 228 | Ac-LTF$r8HYWAQF$S-NH2 | 1631.85 | 816.93 | 816.99 |
| 229 | Ac-LTF$r8HYWAQIgl$S-NH2 | 1659.88 | 830.94 | 829.94 |
| 230 | Ac-LTF$r8HYWAQCba$S-NH2 | 1609.87 | 805.94 | 805.96 |
| 231 | Ac-LTF$r8HYWAQCpg$S-NH2 | 1609.87 | 805.94 | 805.96 |
| 232 | Ac-LTF$r8HhYWAQL$S-NH2 | 1611.88 | 806.94 | 807 |
| 233 | Ac-F$r8AYWEAc3chL$A-NH2 | 1328.72 | 665.36 | 665.43 |
| 234 | Ac-F$r8AYWEAc3cTle$A-NH2 | 1314.70 | 658.35 | 1315.62 |
| 235 | Ac-F$r8AYWEAc3cAdm$A-NH2 | 1392.75 | 697.38 | 697.47 |
| 236 | Ac-F$r8AYWEAc3chCha$A-NH2 | 1368.75 | 685.38 | 685.34 |
| 237 | Ac-F$r8AYWEAc3cCha$A-NH2 | 1354.73 | 678.37 | 678.38 |
| 238 | Ac-F$r8AYWEAc6cL$A-NH2 | 1356.75 | 679.38 | 679.42 |
| 239 | Ac-F$r8AYWEAc5cL$A-NH2 | 1342.73 | 672.37 | 672.46 |
| 240 | Ac-hF$r8AYWEAc3cL$A-NH2 | 1328.72 | 665.36 | 665.43 |
| 241 | Ac-Igl5r8AYWEAc3cL$A-NH2 | 1342.73 | 672.37 | 671.5 |
| 243 | Ac-F$r8AYWEAc3cF$A-NH2 | 1348.69 | 675.35 | 675.35 |
| 244 | Ac-F5r8AYWEAc3cIgl$A-NH2 | 1376.72 | 689.36 | 688.37 |
| 245 | Ac-F$r8AYWEAc3cCba$A-NH2 | 1326.70 | 664.35 | 664.47 |
| 246 | Ac-F$r8AYWEAc3cCpg$A-NH2 | 1326.70 | 664.35 | 664.39 |
| 247 | Ac-F$r8AhYWEAc3cL$A-NH2 | 1328.72 | 665.36 | 665.43 |
| 248 | Ac-F$r8AYWEAc3cL$Q-NH2 | 1371.72 | 686.86 | 1372.87 |
| 249 | Ac-F$r8AYWEAibL$A-NH2 | 1316.72 | 659.36 | 1318.18 |
| 250 | Ac-F$r8AYWEAL$A-NH2 | 1302.70 | 652.35 | 1303.75 |
| 251 | Ac-LAF$r8AYWAAL$A-NH2 | 1428.82 | 715.41 | 715.49 |
| 252 | Ac-LTF$r8HYWAAc3cL$S-NH2 | 1552.84 | 777.42 | 777.5 |
| 253 | Ac-NleTF$r8HYWAQL$S-NH2 | 1597.87 | 799.94 | 800.04 |
| 254 | Ac-VTF$r8HYWAQL$S-NH2 | 1583.85 | 792.93 | 793.04 |
| 255 | Ac-FTF$r8HYWAQL$S-NH2 | 1631.85 | 816.93 | 817.02 |
| 256 | Ac-WTF$r8HYWAQL$S-NH2 | 1670.86 | 836.43 | 836.85 |
| 257 | Ac-RTF$r8HYWAQL$S-NH2 | 1640.88 | 821.44 | 821.9 |
| 258 | Ac-KTF$r8HYWAQL$S-NH2 | 1612.88 | 807.44 | 807.91 |
| 259 | Ac-LNleF$r8HYWAQL$S-NH2 | 1609.90 | 805.95 | 806.43 |
| 260 | Ac-LVF$r8HYWAQL$S-NH2 | 1595.89 | 798.95 | 798.93 |
| 261 | Ac-LFF$r8HYWAQL$S-NH2 | 1643.89 | 822.95 | 823.38 |
| 262 | Ac-LWF$r8HYWAQL$S-NH2 | 1682.90 | 842.45 | 842.55 |
| 263 | Ac-LRF$r8HYWAQL$S-NH2 | 1652.92 | 827.46 | 827.52 |
| 264 | Ac-LKF$r8HYWAQL$S-NH2 | 1624.91 | 813.46 | 813.51 |
| 265 | Ac-LTF$r8NleYWAQL$S-NH2 | 1573.89 | 787.95 | 788.05 |
| 266 | Ac-LTF$r8VYWAQL$S-NH2 | 1559.88 | 780.94 | 780.98 |
| 267 | Ac-LTF$r8FYWAQL$S-NH2 | 1607.88 | 804.94 | 805.32 |
| 268 | Ac-LTF$r8WYWAQL$S-NH2 | 1646.89 | 824.45 | 824.86 |
| 269 | Ac-LTF$r8RYWAQL$S-NH2 | 1616.91 | 809.46 | 809.51 |
| 270 | Ac-LTF$r8KYWAQL$S-NH2 | 1588.90 | 795.45 | 795.48 |
| 271 | Ac-LTF$r8HNleWAQL$S-NH2 | 1547.89 | 774.95 | 774.98 |
| 272 | Ac-LTF$r8HVWAQL$S-NH2 | 1533.87 | 767.94 | 767.95 |
| 273 | Ac-LTF$r8HFWAQL$S-NH2 | 1581.87 | 791.94 | 792.3 |
| 274 | Ac-LTF$r8HWWAQL$S-NH2 | 1620.88 | 811.44 | 811.54 |
| 275 | Ac-LTF$r8HRWAQL$S-NH2 | 1590.90 | 796.45 | 796.52 |
| 276 | Ac-LTF$r8HKWAQL$S-NH2 | 1562.90 | 782.45 | 782.53 |
| 277 | Ac-LTF$r8HYWNleQL$S-NH2 | 1639.91 | 820.96 | 820.98 |
| 278 | Ac-LTF$r8HYWVQL$S-NH2 | 1625.90 | 837.95 | 838.03 |
| 280 | Ac-LTF$r8HYWWQL$S-NH2 | 1712.91 | 857.46 | 857.5 |
| 281 | Ac-LTF$r8HYWKQL$S-NH2 | 1654.92 | 828.46 | 828.49 |
| 282 | Ac-LTF$r8HYWANleL$S-NH2 | 1582.89 | 792.45 | 792.52 |
| 283 | Ac-LTF5r8HYWAVL$S-NH2 | 1568.88 | 785.44 | 785.49 |
| 284 | Ac-LTF$r8HYWAFL$S-NH2 | 1616.88 | 809.44 | 809.47 |
| 285 | Ac-LTF$r8HYWAWL$S-NH2 | 1655.89 | 828.95 | 829 |
| 286 | Ac-LTF$r8HYWARL$S-NH2 | 1625.91 | 813.96 | 813.98 |
| 287 | Ac-LTF5r8HYWAQL$Nle-NH2 | 1623.92 | 812.96 | 813.39 |
| 288 | Ac-LTF$r8HYWAQL$V-NH2 | 1609.90 | 805.95 | 805.99 |
| 289 | Ac-LTF$r8HYWAQL$F-NH2 | 1657.90 | 829.95 | 830.26 |
| 290 | Ac-LTF$r8HYWAQL$W-NH2 | 1696.91 | 849.46 | 849.5 |
| 291 | Ac-LTF$r8HYWAQL$R-NH2 | 1666.94 | 834.47 | 834.56 |
| 292 | Ac-LTF$r8HYWAQL$K-NH2 | 1638.93 | 820.47 | 820.49 |
| 293 | Ac-Q$r8QQTFSN$WRLLAibQN-NH2 | 2080.12 | 1041.06 | 1041.54 |
| 294 | Ac-QSQQ5r8FSNLWRSLAibQN-NH2 | 2066.11 | 1034.06 | 1034.58 |
| 295 | Ac-LT2Pal$r8HYWAQL$S-NH2 | 1598.86 | 800.43 | 800.49 |
| 296 | Ac-LT3Pal$r8HYWAQL$S-NH2 | 1598.86 | 800.43 | 800.49 |
| 297 | Ac-LT4Pal$r8HYWAQL$S-NH2 | 1598.86 | 800.43 | 800.49 |
| 298 | Ac-LTF2CF3$r8HYWAQL$S-NH2 | 1665.85 | 833.93 | 834.01 |
| 299 | Ac-LTF2CN$r8HYWAQL$S-NH2 | 1622.86 | 812.43 | 812.47 |
| 300 | Ac-LTF2Me$r8HYWAQL$S-NH2 | 1611.88 | 806.94 | 807 |
| 301 | Ac-LTF3CI$r8HYWAQL$S-NH2 | 1631.83 | 816.92 | 816.99 |
| 302 | Ac-LTF4CF3Sr8HYWAQL$S-NH2 | 1665.85 | 833.93 | 833.94 |
| 303 | Ac-LTF4tBu$r8HYWAQL$S-NH2 | 1653.93 | 827.97 | 828.02 |
| 304 | Ac-LTF5F$r8HYWAQL$S-NH2 | 1687.82 | 844.91 | 844.96 |
| 305 | Ac-LTF$r8HY3BthAAQL$S-NH2 | 1614.83 | 808.42 | 808.48 |
| 306 | Ac-LTF2Br$r8HYWAQL$S-NH2 | 1675.78 | 838.89 | 838.97 |
| 307 | Ac-LTF4Br$r8HYWAQL$S-NH2 | 1675.78 | 838.89 | 839.86 |
| 308 | Ac-LTF2CI$r8HYWAQL$S-NH2 | 1631.83 | 816.92 | 816.99 |
| 309 | Ac-LTF4CI$r8HYWAQL$S-NH2 | 1631.83 | 816.92 | 817.36 |
| 310 | Ac-LTF3CN$r8HYWAQL$S-NH2 | 1622.86 | 812.43 | 812.47 |
| 311 | Ac-LTF4CN$r8HYWAQL$S-NH2 | 1622.86 | 812.43 | 812.47 |
| 312 | Ac-LTF34Cl2$r8HYWAQL$S-NH2 | 1665.79 | 833.90 | 833.94 |
| 313 | Ac-LTF34F2$r8HYWAQL$S-NH2 | 1633.85 | 817.93 | 817.95 |
| 314 | Ac-LTF35F2$r8HYWAQL$S-NH2 | 1633.85 | 817.93 | 817.95 |
| 315 | Ac-LTDip$r8HYWAQL$S-NH2 | 1673.90 | 837.95 | 838.01 |
| 316 | Ac-LTF2F$r8HYWAQL$S-NH2 | 1615.86 | 808.93 | 809 |
| 317 | Ac-LTF3F$r8HYWAQL$S-NH2 | 1615.86 | 808.93 | 809 |
| 318 | Ac-LTF4F$r8HYWAQL$S-NH2 | 1615.86 | 808.93 | 809 |
| 319 | Ac-LTF4I$r8HYWAQL$S-NH2 | 1723.76 | 862.88 | 862.94 |
| 320 | Ac-LTF3Me$r8HYWAQL$S-NH2 | 1611.88 | 806.94 | 807.07 |
| 321 | Ac-LTF4Me$r8HYWAQL$S-NH2 | 1611.88 | 806.94 | 807 |
| 322 | Ac-LT1Nal$r8HYWAQL$S-NH2 | 1647.88 | 824.94 | 824.98 |
| 323 | Ac-LT2Nal$r8HYWAQL$S-NH2 | 1647.88 | 824.94 | 825.06 |
| 324 | Ac-LTF3CF3$r8HYWAQL$S-NH2 | 1665.85 | 833.93 | 834.01 |
| 325 | Ac-LTF4NO2$r8HYWAQL$S-NH2 | 1642.85 | 822.43 | 822.46 |
| 326 | Ac-LTF3NO2$r8HYWAQL$S-NH2 | 1642.85 | 822.43 | 822.46 |
| 327 | Ac-LTF$r82ThiYWAQL$S-NH2 | 1613.83 | 807.92 | 807.96 |
| 328 | Ac-LTF$r8HBipWAQL$S-NH2 | 1657.90 | 829.95 | 830.01 |
| 329 | Ac-LTF$r8HF4tBuWAQL$S-NH2 | 1637.93 | 819.97 | 820.02 |
| 330 | Ac-LTF$r8HF4CF3WAQL$S-NH2 | 1649.86 | 825.93 | 826.02 |
| 331 | Ac-LTF$r8HF4ClWAQL$S-NH2 | 1615.83 | 808.92 | 809.37 |
| 332 | Ac-LTF$r8HF4MeWAQL$S-NH2 | 1595.89 | 798.95 | 799.01 |
| 333 | Ac-LTF$r8HF4BrWAQL$S-NH2 | 1659.78 | 830.89 | 830.98 |
| 334 | Ac-LTF$r8HF4CNWAQL$S-NH2 | 1606.87 | 804.44 | 804.56 |
| 335 | Ac-LTF$r8HF4NO2WAQL$S-NH2 | 1626.86 | 814.43 | 814.55 |
| 336 | Ac-LTF$r8H1NalWAQL$S-NH2 | 1631.89 | 816.95 | 817.06 |
| 337 | Ac-LTF$r8H2NalWAQL$S-NH2 | 1631.89 | 816.95 | 816.99 |
| 338 | Ac-LTF$r8HWAQL$S-NH2 | 1434.80 | 718.40 | 718.49 |
| 339 | Ac-LTF5r8HY1NalAQL$S-NH2 | 1608.87 | 805.44 | 805.52 |
| 340 | Ac-LTF5r8HY2NalAQL$S-NH2 | 1608.87 | 805.44 | 805.52 |
| 341 | Ac-LTF$r8HYWAQl$S-NH2 | 1597.87 | 799.94 | 800.07 |
| 342 | Ac-LTF$r8HYWAQNle$S-NH2 | 1597.87 | 799.94 | 800.44 |
| 343 | Ac-LTF$er8HYWAQL$eA-NH2 | 1581.87 | 791.94 | 791.98 |
| 344 | Ac-LTF$r8HYWAQL$Abu-NH2 | 1595.89 | 798.95 | 799.03 |
| 345 | Ac-LTF$r8HYWAbuQL$S-NH2 | 1611.88 | 806.94 | 804.47 |
| 346 | Ac-LAF5r8HYWAQL$S-NH2 | 1567.86 | 784.93 | 785.49 |
| 347 | Ac-LTF$r8NLWANleL$Q-NH2 | 1550.92 | 776.46 | 777.5 |
| 348 | Ac-LTF$r8ALWANleL$Q-NH2 | 1507.92 | 754.96 | 755.52 |
| 349 | Ac-LAF$r8NLWANleL$Q-NH2 | 1520.91 | 761.46 | 762.48 |
| 350 | Ac-F$r8AYWAAc3cL$A-NH2 | 1256.70 | 629.35 | 1257.56 |
| 351 | Ac-LTF$r8AYWAAL$S-NH2 | 1474.82 | 738.41 | 738.55 |
| 352 | Ac-LVF$r8AYWAQL$S-NH2 | 1529.87 | 765.94 | 766 |
| 353 | Ac-LTF$r8AYWAbuQL$S-NH2 | 1545.86 | 773.93 | 773.92 |
| 354 | Ac-LTF$r8AYWNleQL$S-NH2 | 1573.89 | 787.95 | 788.17 |
| 355 | Ac-LTF$r8AbuYWAQL$S-NH2 | 1545.86 | 773.93 | 773.99 |
| 356 | Ac-LTF$r8AYWHQL$S-NH2 | 1597.87 | 799.94 | 799.97 |
| 357 | Ac-LTF$r8AYWKQL$S-NH2 | 1588.90 | 795.45 | 795.53 |
| 358 | Ac-LTF5r8AYWOQL$S-NH2 | 1574.89 | 788.45 | 788.5 |
| 359 | Ac-LTF$r8AYWRQL$S-NH2 | 1616.91 | 809.46 | 809.51 |
| 360 | Ac-LTF$r8AYWSQL$S-NH2 | 1547.84 | 774.92 | 774.96 |
| 361 | Ac-LTF$r8AYWRAL$S-NH2 | 1559.89 | 780.95 | 780.95 |
| 362 | Ac-LTF$r8AYWRQL$A-NH2 | 1600.91 | 801.46 | 801.52 |
| 363 | Ac-LTF$r8AYWRAL$A-NH2 | 1543.89 | 772.95 | 773.03 |
| 364 | Ac-LTF$r5HYWAQL$s8S-NH2 | 1597.87 | 799.94 | 799.97 |
| 365 | Ac-LTF$HYWAQL$r8S-NH2 | 1597.87 | 799.94 | 799.97 |
| 366 | Ac-LTF$r8HYWAAL$S-NH2 | 1540.84 | 771.42 | 771.48 |
| 367 | Ac-LTF$r8HYWAAbuL$S-NH2 | 1554.86 | 778.43 | 778.51 |
| 368 | Ac-LTF$r8HYWALL$S-NH2 | 1582.89 | 792.45 | 792.49 |
| 369 | Ac-F$r8AYWHAL$A-NH2 | 1310.72 | 656.36 | 656.4 |
| 370 | Ac-F$r8AYWAAL$A-NH2 | 1244.70 | 623.35 | 1245.61 |
| 371 | Ac-F$r8AYWSAL$A-NH2 | 1260.69 | 631.35 | 1261.6 |
| 372 | Ac-F$r8AYWRAL$A-NH2 | 1329.76 | 665.88 | 1330.72 |
| 373 | Ac-F$r8AYWKAL$A-NH2 | 1301.75 | 651.88 | 1302.67 |
| 374 | Ac-F5r8AYWOAL$A-NH2 | 1287.74 | 644.87 | 1289.13 |
| 375 | Ac-F$r8VYWEAc3cL$A-NH2 | 1342.73 | 672.37 | 1343.67 |
| 376 | Ac-F$r8FYWEAc3cL$A-NH2 | 1390.73 | 696.37 | 1392.14 |
| 377 | Ac-F$r8WYWEAc3cL$A-NH2 | 1429.74 | 715.87 | 1431.44 |
| 378 | Ac-F$r8RYWEAc3cL$A-NH2 | 1399.77 | 700.89 | 700.95 |
| 379 | Ac-F$r8KYWEAc3cL$A-NH2 | 1371.76 | 686.88 | 686.97 |
| 380 | Ac-F$r8ANleWEAc3cL$A-NH2 | 1264.72 | 633.36 | 1265.59 |
| 381 | Ac-F$r8AVWEAc3cL$A-NH2 | 1250.71 | 626.36 | 1252.2 |
| 382 | Ac-F$r8AFWEAc3cL$A-NH2 | 1298.71 | 650.36 | 1299.64 |
| 383 | Ac-F$r8AWWEAc3cL$A-NH2 | 1337.72 | 669.86 | 1338.64 |
| 384 | Ac-F$r8ARWEAc3cL$A-NH2 | 1307.74 | 654.87 | 655 |
| 385 | Ac-F$r8AKWEAc3cL$A-NH2 | 1279.73 | 640.87 | 641.01 |
| 386 | Ac-F$r8AYWVAc3cL$A-NH2 | 1284.73 | 643.37 | 643.38 |
| 387 | Ac-F$r8AYWFAc3cL$A-NH2 | 1332.73 | 667.37 | 667.43 |
| 388 | Ac-F$r8AYWWAc3cL$A-NH2 | 1371.74 | 686.87 | 686.97 |
| 389 | Ac-F$r8AYWRAc3cL$A-NH2 | 1341.76 | 671.88 | 671.94 |
| 390 | Ac-F$r8AYWKAc3cL$A-NH2 | 1313.75 | 657.88 | 657.88 |
| 391 | Ac-F5r8AYWEVLSA-NH2 | 1330.73 | 666.37 | 666.47 |
| 392 | Ac-F$r8AYWEFL$A-NH2 | 1378.73 | 690.37 | 690.44 |
| 393 | Ac-F$r8AYWEWL$A-NH2 | 1417.74 | 709.87 | 709.91 |
| 394 | Ac-F$r8AYWERL$A-NH2 | 1387.77 | 694.89 | 1388.66 |
| 395 | Ac-F$r8AYWEKL$A-NH2 | 1359.76 | 680.88 | 1361.21 |
| 396 | Ac-F$r8AYWEAc3cL$V-NH2 | 1342.73 | 672.37 | 1343.59 |
| 397 | Ac-F$r8AYWEAc3cL$F-NH2 | 1390.73 | 696.37 | 1392.58 |
| 398 | Ac-F$r8AYWEAc3cL$W-NH2 | 1429.74 | 715.87 | 1431.29 |
| 399 | Ac-F$r8AYWEAc3cL$R-NH2 | 1399.77 | 700.89 | 700.95 |
| 400 | Ac-F$r8AYWEAc3cL$K-NH2 | 1371.76 | 686.88 | 686.97 |
| 401 | Ac-F$r8AYWEAc3cL$AV-NH2 | 1413.77 | 707.89 | 707.91 |
| 402 | Ac-F$r8AYWEAc3cL$AF-NH2 | 1461.77 | 731.89 | 731.96 |
| 403 | Ac-F$r8AYWEAc3cL$AW-NH2 | 1500.78 | 751.39 | 751.5 |
| 404 | Ac-F$r8AYWEAc3cL$AR-NH2 | 1470.80 | 736.40 | 736.47 |
| 405 | Ac-F$r8AYWEAc3cL$AK-NH2 | 1442.80 | 722.40 | 722.41 |
| 406 | Ac-F$r8AYWEAc3cL$AH-NH2 | 1451.76 | 726.88 | 726.93 |
| 407 | Ac-LTF2NO2$r8HYWAQL$S-NH2 | 1642.85 | 822.43 | 822.54 |
| 408 | Ac-LTA5r8HYAAQL$S-NH2 | 1406.79 | 704.40 | 704.5 |
| 409 | Ac-LTF$r8HYAAQL$S-NH2 | 1482.82 | 742.41 | 742.47 |
| 410 | Ac-QSQQTF5r8NLWALLSAN-NH2 | 1966.07 | 984.04 | 984.38 |
| 411 | Ac-QAibQQTF5r8NLWALLSAN-NH2 | 1964.09 | 983.05 | 983.42 |
| 412 | Ac-QAibQQTF$r8ALWALL$AN-NH2 | 1921.08 | 961.54 | 961.59 |
| 413 | Ac-AAAATF5r8AAWAALSAA-NH2 | 1608.90 | 805.45 | 805.52 |
| 414 | Ac-F$r8AAWRAL$Q-NH2 | 1294.76 | 648.38 | 648.48 |
| 415 | Ac-TF$r8AAWAAL$Q-NH2 | 1310.74 | 656.37 | 1311.62 |
| 416 | Ac-TF$r8AAWRAL$A-NH2 | 1338.78 | 670.39 | 670.46 |
| 417 | Ac-VF$r8AAWRAL$Q-NH2 | 1393.82 | 697.91 | 697.99 |
| 418 | Ac-AF$r8AAWAAL$A-NH2 | 1223.71 | 612.86 | 1224.67 |
| 420 | Ac-TF$r8AAWKAL$Q-NH2 | 1367.80 | 684.90 | 684.97 |
| 421 | Ac-TF$r8AAWOAL$Q-NH2 | 1353.78 | 677.89 | 678.01 |
| 422 | Ac-TF$r8AAWSAL$Q-NH2 | 1326.73 | 664.37 | 664.47 |
| 423 | Ac-LTF$r8AAWRAL$Q-NH2 | 1508.89 | 755.45 | 755.49 |
| 424 | Ac-F$r8AYWAQL$A-NH2 | 1301.72 | 651.86 | 651.96 |
| 425 | Ac-F5r8AWWAAL$A-NH2 | 1267.71 | 634.86 | 634.87 |
| 426 | Ac-F$r8AWWAQL$A-NH2 | 1324.73 | 663.37 | 663.43 |
| 427 | Ac-F$r8AYWEAL$-NH2 | 1231.66 | 616.83 | 1232.93 |
| 428 | Ac-F$r8AYWAAL$-NH2 | 1173.66 | 587.83 | 1175.09 |
| 429 | Ac-F$r8AYWKAL$-NH2 | 1230.72 | 616.36 | 616.44 |
| 430 | Ac-F$r8AYWOAL$-NH2 | 1216.70 | 609.35 | 609.48 |
| 431 | Ac-F$r8AYWQAL$-NH2 | 1230.68 | 616.34 | 616.44 |
| 432 | Ac-F$r8AYWAQL$-NH2 | 1230.68 | 616.34 | 616.37 |
| 433 | Ac-F$r8HYWDQL$S-NH2 | 1427.72 | 714.86 | 714.86 |
| 434 | Ac-F$r8HFWEQL$S-NH2 | 1425.74 | 713.87 | 713.98 |
| 435 | Ac-F$r8AYWHQL$S-NH2 | 1383.73 | 692.87 | 692.96 |
| 436 | Ac-F$r8AYWKQL$S-NH2 | 1374.77 | 688.39 | 688.45 |
| 437 | Ac-F5r8AYWOQL$S-NH2 | 1360.75 | 681.38 | 681.49 |
| 438 | Ac-F$r8HYWSQL$S-NH2 | 1399.73 | 700.87 | 700.95 |
| 439 | Ac-F$r8HWWEQL$S-NH2 | 1464.76 | 733.38 | 733.44 |
| 440 | Ac-F$r8HWWAQL$S-NH2 | 1406.75 | 704.38 | 704.43 |
| 441 | Ac-F$r8AWWHQL$S-NH2 | 1406.75 | 704.38 | 704.43 |
| 442 | Ac-F$r8AWWKQL$S-NH2 | 1397.79 | 699.90 | 699.92 |
| 443 | Ac-F$r8AWWOQL$S-NH2 | 1383.77 | 692.89 | 692.96 |
| 444 | Ac-F$r8HWWSQL$S-NH2 | 1422.75 | 712.38 | 712.42 |
| 445 | Ac-LTF$r8NYWANleL$Q-NH2 | 1600.90 | 801.45 | 801.52 |
| 446 | Ac-LTF$r8NLWAQL$Q-NH2 | 1565.90 | 783.95 | 784.06 |
| 447 | Ac-LTF$r8NYWANleL$A-NH2 | 1543.88 | 772.94 | 773.03 |
| 448 | Ac-LTF$r8NLWAQL$A-NH2 | 1508.88 | 755.44 | 755.49 |
| 449 | Ac-LTF$r8AYWANleL$Q-NH2 | 1557.90 | 779.95 | 780.06 |
| 450 | Ac-LTF$r8ALWAQL$Q-NH2 | 1522.89 | 762.45 | 762.45 |
| 451 | Ac-LAF$r8NYWANleL$Q-NH2 | 1570.89 | 786.45 | 786.5 |
| 452 | Ac-LAF$r8NLWAQL$Q-NH2 | 1535.89 | 768.95 | 769.03 |
| 453 | Ac-LAF5r8AYWANleL$A-NH2 | 1470.86 | 736.43 | 736.47 |
| 454 | Ac-LAF$r8ALWAQL$A-NH2 | 1435.86 | 718.93 | 719.01 |
| 455 | Ac-LAF$r8AYWAAL$A-NH2 | 1428.82 | 715.41 | 715.41 |
| 456 | Ac-F$r8AYWEAc3cL$AAib-NH2 | 1399.75 | 700.88 | 700.95 |
| 457 | Ac-F$r8AYWAQL$AA-NH2 | 1372.75 | 687.38 | 687.78 |
| 458 | Ac-F$r8AYWAAc3cL$AA-NH2 | 1327.73 | 664.87 | 664.84 |
| 459 | Ac-F$r8AYWSAc3cL$AA-NH2 | 1343.73 | 672.87 | 672.9 |
| 460 | Ac-F$r8AYWEAc3cL$AS-NH2 | 1401.73 | 701.87 | 701.84 |
| 461 | Ac-F$r8AYWEAc3cL$AT-NH2 | 1415.75 | 708.88 | 708.87 |
| 462 | Ac-F$r8AYWEAc3cL$AL-NH2 | 1427.79 | 714.90 | 714.94 |
| 463 | Ac-F$r8AYWEAc3cL$AQ-NH2 | 1442.76 | 722.38 | 722.41 |
| 464 | Ac-F$r8AFWEAc3cL$AA-NH2 | 1369.74 | 685.87 | 685.93 |
| 465 | Ac-F$r8AWWEAc3cL$AA-NH2 | 1408.75 | 705.38 | 705.39 |
| 466 | Ac-F$r8AYWEAc3cL$SA-NH2 | 1401.73 | 701.87 | 701.99 |
| 467 | Ac-F$r8AYWEAL$AA-NH2 | 1373.74 | 687.87 | 687.93 |
| 468 | Ac-F$r8AYWENleL$AA-NH2 | 1415.79 | 708.90 | 708.94 |
| 469 | Ac-F$r8AYWEAc3cL$AbuA-NH2 | 1399.75 | 700.88 | 700.95 |
| 470 | Ac-F$r8AYWEAc3cL$NleA-NH2 | 1427.79 | 714.90 | 714.86 |
| 471 | Ac-F$r8AYWEAibL$NleA-NH2 | 1429.80 | 715.90 | 715.97 |
| 472 | Ac-F$r8AYWEAL$NleA-NH2 | 1415.79 | 708.90 | 708.94 |
| 473 | Ac-F$r8AYWENleL$NleA-NH2 | 1457.83 | 729.92 | 729.96 |
| 474 | Ac-F$r8AYWEAibL$Abu-NH2 | 1330.73 | 666.37 | 666.39 |
| 475 | Ac-F$r8AYWENleL$Abu-NH2 | 1358.76 | 680.38 | 680.39 |
| 476 | Ac-F$r8AYWEAL$Abu-NH2 | 1316.72 | 659.36 | 659.36 |
| 477 | Ac-LTF$r8AFWAQL$S-NH2 | 1515.85 | 758.93 | 759.12 |
| 478 | Ac-LTF$r8AWWAQL$S-NH2 | 1554.86 | 778.43 | 778.51 |
| 479 | Ac-LTF$r8AYWAQI$S-NH2 | 1531.84 | 766.92 | 766.96 |
| 480 | Ac-LTF5r8AYWAQNle$S-NH2 | 1531.84 | 766.92 | 766.96 |
| 481 | Ac-LTF$r8AYWAQL$SA-NH2 | 1602.88 | 802.44 | 802.48 |
| 482 | Ac-LTF$r8AWWAQL$A-NH2 | 1538.87 | 770.44 | 770.89 |
| 483 | Ac-LTF$r8AYWAQI$A-NH2 | 1515.85 | 758.93 | 759.42 |
| 484 | Ac-LTF5r8AYWAQNle$A-NH2 | 1515.85 | 758.93 | 759.42 |
| 485 | Ac-LTF$r8AYWAQL$AA-NH2 | 1586.89 | 794.45 | 794.94 |
| 486 | Ac-LTF$r8HWWAQL$S-NH2 | 1620.88 | 811.44 | 811.47 |
| 487 | Ac-LTF$r8HRWAQL$S-NH2 | 1590.90 | 796.45 | 796.52 |
| 488 | Ac-LTF$r8HKWAQL$S-NH2 | 1562.90 | 782.45 | 782.53 |
| 489 | Ac-LTF$r8HYWAQL$W-NH2 | 1696.91 | 849.46 | 849.5 |
| 491 | Ac-F$r8AYWAbuAL$A-NH2 | 1258.71 | 630.36 | 630.5 |
| 492 | Ac-F$r8AbuYWEAL$A-NH2 | 1316.72 | 659.36 | 659.51 |
| 493 | Ac-NlePRF%r8NYWRLL%QN-NH2 | 1954.13 | 978.07 | 978.54 |
| 494 | Ac-TSF%r8HYWAQL%S-NH2 | 1573.83 | 787.92 | 787.98 |
| 495 | Ac-LTF%r8AYWAQL%S-NH2 | 1533.86 | 767.93 | 768 |
| 496 | Ac-HTF$r8HYWAQL$S-NH2 | 1621.84 | 811.92 | 811.96 |
| 497 | Ac-LHF$r8HYWAQL$S-NH2 | 1633.88 | 817.94 | 818.02 |
| 498 | Ac-LTF$r8HHWAQL$S-NH2 | 1571.86 | 786.93 | 786.94 |
| 499 | Ac-LTF$r8HYWHQL$S-NH2 | 1663.89 | 832.95 | 832.38 |
| 500 | Ac-LTF$r8HYWAHL$S-NH2 | 1606.87 | 804.44 | 804.48 |
| 501 | Ac-LTF$r8HYWAQL$H-NH2 | 1647.89 | 824.95 | 824.98 |
| 502 | Ac-LTF$r8HYWAQL$S-NHPr | 1639.91 | 820.96 | 820.98 |
| 503 | Ac-LTF$r8HYWAQL$S-NHsBu | 1653.93 | 827.97 | 828.02 |
| 504 | Ac-LTF$r8HYWAQL$S-NHiBu | 1653.93 | 827.97 | 828.02 |
| 505 | Ac-LTF$r8HYWAQL$S-NHBn | 1687.91 | 844.96 | 844.44 |
| 506 | Ac-LTF$r8HYWAQL$S-NHPe | 1700.92 | 851.46 | 851.99 |
| 507 | Ac-LTF$r8HYWAQL$S-NHChx | 1679.94 | 840.97 | 841.04 |
| 508 | Ac-ETF$r8AYWAQL$S-NH2 | 1547.80 | 774.90 | 774.96 |
| 509 | Ac-STF$r8AYWAQL$S-NH2 | 1505.79 | 753.90 | 753.94 |
| 510 | Ac-LEF$r8AYWAQL$S-NH2 | 1559.84 | 780.92 | 781.25 |
| 511 | Ac-LSF$r8AYWAQL$S-NH2 | 1517.83 | 759.92 | 759.93 |
| 512 | Ac-LTF$r8EYWAQL$S-NH2 | 1589.85 | 795.93 | 795.97 |
| 513 | Ac-LTF$r8SYWAQL$S-NH2 | 1547.84 | 774.92 | 774.96 |
| 514 | Ac-LTF$r8AYWEQL$S-NH2 | 1589.85 | 795.93 | 795.9 |
| 515 | Ac-LTF$r8AYWAEL$S-NH2 | 1532.83 | 767.42 | 766.96 |
| 516 | Ac-LTF$r8AYWASL$S-NH2 | 1490.82 | 746.41 | 746.46 |
| 517 | Ac-LTF$r8AYWAQL$E-NH2 | 1573.85 | 787.93 | 787.98 |
| 518 | Ac-LTF2CN$r8HYWAQL$S-NH2 | 1622.86 | 812.43 | 812.47 |
| 519 | Ac-LTF3CI$r8HYWAQL$S-NH2 | 1631.83 | 816.92 | 816.99 |
| 520 | Ac-LTDip$r8HYWAQL$S-NH2 | 1673.90 | 837.95 | 838.01 |
| 521 | Ac-LTF$r8HYWAQTle$S-NH2 | 1597.87 | 799.94 | 800.04 |
| 522 | Ac-F$r8AY6clWEAL$A-NH2 | 1336.66 | 669.33 | 1338.56 |
| 523 | Ac-F5r8AYdl6brWEAL$A-NH2 | 1380.61 | 691.31 | 692.2 |
| 524 | Ac-F5r8AYdl6fWEAL$A-NH2 | 1320.69 | 661.35 | 1321.61 |
| 525 | Ac-F5r8AYdl4mWEAL$A-NH2 | 1316.72 | 659.36 | 659.36 |
| 526 | Ac-F5r8AYdl5clWEAL$A-NH2 | 1336.66 | 669.33 | 669.35 |
| 527 | Ac-F5r8AYdl7mWEAL$A-NH2 | 1316.72 | 659.36 | 659.36 |
| 528 | Ac-LTF%r8HYWAQL%A-NH2 | 1583.89 | 792.95 | 793.01 |
| 529 | Ac-LTF$r8HCouWAQL$S-NH2 | 1679.87 | 840.94 | 841.38 |
| 530 | Ac-LTFEHCouWAQLTS-NH2 | 1617.75 | 809.88 | 809.96 |
| 531 | Ac-LTA5r8HCouWAQL$S-NH2 | 1603.84 | 802.92 | 803.36 |
| 532 | Ac-F$r8AYWEAL$AbuA-NH2 | 1387.75 | 694.88 | 694.88 |
| 533 | Ac-F$r8AYWEAI$AA-NH2 | 1373.74 | 687.87 | 687.93 |
| 534 | Ac-F$r8AYWEANle$AA-NH2 | 1373.74 | 687.87 | 687.93 |
| 535 | Ac-F$r8AYWEAmlL$AA-NH2 | 1429.80 | 715.90 | 715.97 |
| 536 | Ac-F5r8AYWQALSAA-NH2 | 1372.75 | 687.38 | 687.48 |
| 537 | Ac-F$r8AYWAAL$AA-NH2 | 1315.73 | 658.87 | 658.92 |
| 538 | Ac-F$r8AYWAbuAL$AA-NH2 | 1329.75 | 665.88 | 665.95 |
| 539 | Ac-F$r8AYWNleAL$AA-NH2 | 1357.78 | 679.89 | 679.94 |
| 540 | Ac-F$r8AbuYWEAL$AA-NH2 | 1387.75 | 694.88 | 694.96 |
| 541 | Ac-F$r8NleYWEAL$AA-NH2 | 1415.79 | 708.90 | 708.94 |
| 542 | Ac-F$r8FYWEAL$AA-NH2 | 1449.77 | 725.89 | 725.97 |
| 543 | Ac-LTF$r8HYWAQhL$S-NH2 | 1611.88 | 806.94 | 807 |
| 544 | Ac-LTF$r8HYWAQAdm$S-NH2 | 1675.91 | 838.96 | 839.04 |
| 545 | Ac-LTF5r8HYWAQIgl$S-NH2 | 1659.88 | 830.94 | 829.94 |
| 546 | Ac-F5r8AYWAQL$AA-NH2 | 1372.75 | 687.38 | 687.48 |
| 547 | Ac-LTF$r8ALWAQL$Q-NH2 | 1522.89 | 762.45 | 762.52 |
| 548 | Ac-F$r8AYWEAL$AA-NH2 | 1373.74 | 687.87 | 687.93 |
| 549 | Ac-F5r8AYWENleL$AA-NH2 | 1415.79 | 708.90 | 708.94 |
| 550 | Ac-F$r8AYWEAibL$Abu-NH2 | 1330.73 | 666.37 | 666.39 |
| 551 | Ac-F5r8AYWENleL$Abu-NH2 | 1358.76 | 680.38 | 680.38 |
| 552 | Ac-F$r8AYWEAL$Abu-NH2 | 1316.72 | 659.36 | 659.36 |
| 553 | Ac-F$r8AYWEAc3cL$AbuA-NH2 | 1399.75 | 700.88 | 700.95 |
| 554 | Ac-F$r8AYWEAc3cL$NleA-NH2 | 1427.79 | 714.90 | 715.01 |
| 555 | H-LTF$r8AYWAQL$S-NH2 | 1489.83 | 745.92 | 745.95 |
| 556 | mdPEG3-LTF$r8AYWAQL$S-NH2 | 1679.92 | 840.96 | 840.97 |
| 557 | mdPEG7-LTF$r8AYWAQL$S-NH2 | 1856.02 | 929.01 | 929.03 |
| 558 | Ac-F5r8AompEt6clWEAL$A-NH2 | 1470.71 | 736.36 | 788.17 |
| 559 | Ac-LTF3Cl$r8AYWAQL$S-NH2 | 1565.81 | 783.91 | 809.18 |
| 560 | Ac-LTF3Cl$r8HYWAQL$A-NH2 | 1615.83 | 808.92 | 875.24 |
| 561 | Ac-LTF3Cl$r8HYWWQL$S-NH2 | 1746.87 | 874.44 | 841.65 |
| 562 | Ac-LTF3Cl$r8AYWWQL$S-NH2 | 1680.85 | 841.43 | 824.63 |
| 563 | Ac-LTF$r8AYWWQL$S-NH2 | 1646.89 | 824.45 | 849.98 |
| 564 | Ac-LTF$r8HYWWQL$A-NH2 | 1696.91 | 849.46 | 816.67 |
| 565 | Ac-LTF$r8AYWWQL$A-NH2 | 1630.89 | 816.45 | 776.15 |
| 566 | Ac-LTF4F$r8AYWAQL$S-NH2 | 1549.83 | 775.92 | 776.15 |
| 567 | Ac-LTF2F$r8AYWAQL$S-NH2 | 1549.83 | 775.92 | 776.15 |
| 568 | Ac-LTF3F$r8AYWAQL$S-NH2 | 1549.83 | 775.92 | 785.12 |
| 569 | Ac-LTF34F2$r8AYWAQL$S-NH2 | 1567.83 | 784.92 | 785.12 |
| 570 | Ac-LTF35F2$r8AYWAQL$S-NH2 | 1567.83 | 784.92 | 1338.74 |
| 571 | Ac-F3Cl$r8AYWEAL$A-NH2 | 1336.66 | 669.33 | 705.28 |
| 572 | Ac-F3Cl$r8AYWEAL$AA-NH2 | 1407.70 | 704.85 | 680.11 |
| 573 | Ac-F5r8AY6clWEALSAA-NH2 | 1407.70 | 704.85 | 736.83 |
| 574 | Ac-F$r8AY6clWEAL$-NH2 | 1265.63 | 633.82 | 784.1 |
| 575 | Ac-LTF$r8HYWAQLSt/S-NH2 | 16.03 | 9.02 | 826.98 |
| 576 | Ac-LTF$r8HYWAQL$S-NHsBu | 1653.93 | 827.97 | 828.02 |
| 577 | Ac-STF$r8AYWAQL$S-NH2 | 1505.79 | 753.90 | 753.94 |
| 578 | Ac-LTF$r8AYWAEL$S-NH2 | 1532.83 | 767.42 | 767.41 |
| 579 | Ac-LTF$r8AYWAQL$E-NH2 | 1573.85 | 787.93 | 787.98 |
| 580 | mdPEG3-LTF$r8AYWAQL$S-NH2 | 1679.92 | 840.96 | 840.97 |
| 581 | Ac-LTF$r8AYWAQhL$S-NH2 | 1545.86 | 773.93 | 774.31 |
| 583 | Ac-LTF$r8AYWAQCha$S-NH2 | 1571.88 | 786.94 | 787.3 |
| 584 | Ac-LTF$r8AYWAQChg$S-NH2 | 1557.86 | 779.93 | 780.4 |
| 585 | Ac-LTF$r8AYWAQCba$S-NH2 | 1543.84 | 772.92 | 780.13 |
| 586 | Ac-LTF$r8AYWAQF$S-NH2 | 1565.83 | 783.92 | 784.2 |
| 587 | Ac-LTF4F$r8HYWAQhL$S-NH2 | 1629.87 | 815.94 | 815.36 |
| 588 | Ac-LTF4F$r8HYWAQCha$S-NH2 | 1655.89 | 828.95 | 828.39 |
| 589 | Ac-LTF4F$r8HYWAQChg$S-NH2 | 1641.87 | 821.94 | 821.35 |
| 590 | Ac-LTF4F$r8HYWAQCba$S-NH2 | 1627.86 | 814.93 | 814.32 |
| 591 | Ac-LTF4F$r8AYWAQhL$S-NH2 | 1563.85 | 782.93 | 782.36 |
| 592 | Ac-LTF4F$r8AYWAQCha$S-NH2 | 1589.87 | 795.94 | 795.38 |
| 593 | Ac-LTF4F$r8AYWAQChg$S-NH2 | 1575.85 | 788.93 | 788.35 |
| 594 | Ac-LTF4F$r8AYWAQCba$S-NH2 | 1561.83 | 781.92 | 781.39 |
| 595 | Ac-LTF3Cl$r8AYWAQhL$S-NH2 | 1579.82 | 790.91 | 790.35 |
| 596 | Ac-LTF3Cl$r8AYWAQCha$S-NH2 | 1605.84 | 803.92 | 803.67 |
| 597 | Ac-LTF3Cl$r8AYWAQChg$S-NH2 | 1591.82 | 796.91 | 796.34 |
| 598 | Ac-LTF3Cl$r8AYWAQCba$S-NH2 | 1577.81 | 789.91 | 789.39 |
| 599 | Ac-LTF$r8AYWAQhF$S-NH2 | 1579.84 | 790.92 | 791.14 |
| 600 | Ac-LTF$r8AYWAQF3CF3$S-NH2 | 1633.82 | 817.91 | 818.15 |
| 601 | Ac-LTF$r8AYWAQF3Me$S-NH2 | 1581.86 | 791.93 | 791.32 |
| 602 | Ac-LTF$r8AYWAQ1Nal$S-NH2 | 1615.84 | 808.92 | 809.18 |
| 603 | Ac-LTF$r8AYWAQBip$S-NH2 | 1641.86 | 821.93 | 822.13 |
| 604 | Ac-LTF$r8FYWAQL$A-NH2 | 1591.88 | 796.94 | 797.33 |
| 605 | Ac-LTF$r8HYWAQL$S-NHAm | 1667.94 | 834.97 | 835.92 |
| 606 | Ac-LTF$r8HYWAQL$S-NHiAm | 1667.94 | 834.97 | 835.55 |
| 607 | Ac-LTF$r8HYWAQL$S-NHnPr3Ph | 1715.94 | 858.97 | 859.79 |
| 608 | Ac-LTF$r8HYWAQL$S-NHnBu3,3Me | 1681.96 | 841.98 | 842.49 |
| 610 | Ac-LTF$r8HYWAQL$S-NHnPr | 1639.91 | 820.96 | 821.58 |
| 611 | Ac-LTF$r8HYWAQL$S-NHnEt2Ch | 1707.98 | 854.99 | 855.35 |
| 612 | Ac-LTF$r8HYWAQL$S-NHHex | 1681.96 | 841.98 | 842.4 |
| 613 | Ac-LTF$r8AYWAQL$S-NHmdPeg2 | 1633.91 | 817.96 | 818.35 |
| 614 | Ac-LTF$r8AYWAQL$A-NHmdPeg2 | 1617.92 | 809.96 | 810.3 |
| 615 | Ac-LTF$r8AYWAQL$A-NHmdPeg4 | 1705.97 | 853.99 | 854.33 |
| 616 | Ac-F5r8AYdl4mWEAL$A-NH2 | 1316.72 | 659.36 | 659.44 |
| 617 | Ac-F5r8AYdl5clWEAL$A-NH2 | 1336.66 | 669.33 | 669.43 |
| 618 | Ac-LThF$r8AYWAQL$S-NH2 | 1545.86 | 773.93 | 774.11 |
| 619 | Ac-LT2Nal$r8AYWAQL$S-NH2 | 1581.86 | 791.93 | 792.43 |
| 620 | Ac-LTA$r8AYWAQL$S-NH2 | 1455.81 | 728.91 | 729.15 |
| 621 | Ac-LTF$r8AYWVQL$S-NH2 | 1559.88 | 780.94 | 781.24 |
| 622 | Ac-LTF$r8HYWAAL$A-NH2 | 1524.85 | 763.43 | 763.86 |
| 623 | Ac-LTF$r8VYWAQL$A-NH2 | 1543.88 | 772.94 | 773.37 |
| 624 | Ac-LTF$r8IYWAQL$S-NH2 | 1573.89 | 787.95 | 788.17 |
| 625 | Ac-FTF$r8VYWSQL$S-NH2 | 1609.85 | 805.93 | 806.22 |
| 626 | Ac-ITF$r8FYWAQL$S-NH2 | 1607.88 | 804.94 | 805.2 |
| 627 | Ac-2NalTF$r8VYWSQL$S-NH2 | 1659.87 | 830.94 | 831.2 |
| 628 | Ac-ITF$r8LYWSQL$S-NH2 | 1589.89 | 795.95 | 796.13 |
| 629 | Ac-FTF$r8FYWAQL$S-NH2 | 1641.86 | 821.93 | 822.13 |
| 630 | Ac-WTF$r8VYWAQL$S-NH2 | 1632.87 | 817.44 | 817.69 |
| 631 | Ac-WTF$r8WYWAQL$S-NH2 | 1719.88 | 860.94 | 861.36 |
| 632 | Ac-VTF$r8AYWSQL$S-NH2 | 1533.82 | 767.91 | 768.19 |
| 633 | Ac-WTF$r8FYWSQL$S-NH2 | 1696.87 | 849.44 | 849.7 |
| 634 | Ac-FTF$r8IYWAQL$S-NH2 | 1607.88 | 804.94 | 805.2 |
| 635 | Ac-WTF$r8VYWSQL$S-NH2 | 1648.87 | 825.44 | 824.8 |
| 636 | Ac-FTF$r8LYWSQL$S-NH2 | 1623.87 | 812.94 | 812.8 |
| 637 | Ac-YTF$r8FYWSQL$S-NH2 | 1673.85 | 837.93 | 837.8 |
| 638 | Ac-LTF5r8AY6clWEAL$A-NH2 | 1550.79 | 776.40 | 776.14 |
| 639 | Ac-LTF$r8AY6clWSQL$S-NH2 | 1581.80 | 791.90 | 791.68 |
| 640 | Ac-F5r8AY6clWSAL$A-NH2 | 1294.65 | 648.33 | 647.67 |
| 641 | Ac-F5r8AY6clWQALSAA-NH2 | 1406.72 | 704.36 | 703.84 |
| 642 | Ac-LHF$r8AYWAQL$S-NH2 | 1567.86 | 784.93 | 785.21 |
| 643 | Ac-LTF$r8AYWAQL$S-NH2 | 1531.84 | 766.92 | 767.17 |
| 644 | Ac-LTF$r8AHWAQL$S-NH2 | 1505.84 | 753.92 | 754.13 |
| 645 | Ac-LTF$r8AYWAHL$S-NH2 | 1540.84 | 771.42 | 771.61 |
| 646 | Ac-LTF$r8AYWAQL$H-NH2 | 1581.87 | 791.94 | 792.15 |
| 647 | H-LTF$r8AYWAQL$A-NH2 | 1473.84 | 737.92 | 737.29 |
| 648 | Ac-HHF$r8AYWAQL$S-NH2 | 1591.83 | 796.92 | 797.35 |
| 649 | Ac-aAibWTF$r8VYWSQL$S-NH2 | 1804.96 | 903.48 | 903.64 |
| 650 | Ac-AibWTF$r8HYWAQL$S-NH2 | 1755.91 | 878.96 | 879.4 |
| 651 | Ac-AibAWTF$r8HYWAQL$S-NH2 | 1826.95 | 914.48 | 914.7 |
| 652 | Ac-fWTF$r8HYWAQL$S-NH2 | 1817.93 | 909.97 | 910.1 |
| 653 | Ac-AibWWTF$r8HYWAQL$S-NH2 | 1941.99 | 972.00 | 972.2 |
| 654 | Ac-WTF$r8LYWSQL$S-NH2 | 1662.88 | 832.44 | 832.8 |
| 655 | Ac-WTF$r8NleYWSQL$S-NH2 | 1662.88 | 832.44 | 832.6 |
| 656 | Ac-LTF$r8AYWSQL$a-NH2 | 1531.84 | 766.92 | 767.2 |
| 657 | Ac-LTF$r8EYWARL$A-NH2 | 1601.90 | 801.95 | 802.1 |
| 658 | Ac-LTF$r8EYWAHL$A-NH2 | 1582.86 | 792.43 | 792.6 |
| 659 | Ac-aTF$r8AYWAQL$S-NH2 | 1489.80 | 745.90 | 746.08 |
| 660 | Ac-AibTF$r8AYWAQL$S-NH2 | 1503.81 | 752.91 | 753.11 |
| 661 | Ac-AmfTF$r8AYWAQL$S-NH2 | 1579.84 | 790.92 | 791.14 |
| 662 | Ac-AmwTF$r8AYWAQL$S-NH2 | 1618.86 | 810.43 | 810.66 |
| 663 | Ac-NmLTF$r8AYWAQL$S-NH2 | 1545.86 | 773.93 | 774.11 |
| 664 | Ac-LNmTF$r8AYWAQL$S-NH2 | 1545.86 | 773.93 | 774.11 |
| 665 | Ac-LSarF$r8AYWAQL$S-NH2 | 1501.83 | 751.92 | 752.18 |
| 667 | Ac-LGF$r8AYWAQL$S-NH2 | 1487.82 | 744.91 | 745.15 |
| 668 | Ac-LTNmF$r8AYWAQL$S-NH2 | 1545.86 | 773.93 | 774.2 |
| 669 | Ac-TF$r8AYWAQL$S-NH2 | 1418.76 | 710.38 | 710.64 |
| 670 | Ac-ETF$r8AYWAQL$A-NH2 | 1531.81 | 766.91 | 767.2 |
| 671 | Ac-LTF$r8EYWAQL$A-NH2 | 1573.85 | 787.93 | 788.1 |
| 672 | Ac-LT2Nal$r8AYWSQL$S-NH2 | 1597.85 | 799.93 | 800.4 |
| 673 | Ac-LTF$r8AYWAAL$S-NH2 | 1474.82 | 738.41 | 738.68 |
| 674 | Ac-LTF$r8AYWAQhCha$S-NH2 | 1585.89 | 793.95 | 794.19 |
| 675 | Ac-LTF$r8AYWAQChg$S-NH2 | 1557.86 | 779.93 | 780.97 |
| 676 | Ac-LTF$r8AYWAQCba$S-NH2 | 1543.84 | 772.92 | 773.19 |
| 677 | Ac-LTF$r8AYWAQF3CF3$S-NH2 | 1633.82 | 817.91 | 818.15 |
| 678 | Ac-LTF$r8AYWAQ1Nal$S-NH2 | 1615.84 | 808.92 | 809.18 |
| 679 | Ac-LTF$r8AYWAQBip$S-NH2 | 1641.86 | 821.93 | 822.32 |
| 680 | Ac-LT2Nal$r8AYWAQL$S-NH2 | 1581.86 | 791.93 | 792.15 |
| 681 | Ac-LTF$r8AYWVQL$S-NH2 | 1559.88 | 780.94 | 781.62 |
| 682 | Ac-LTF$r8AWWAQL$S-NH2 | 1554.86 | 778.43 | 778.65 |
| 683 | Ac-FTF$r8VYWSQL$S-NH2 | 1609.85 | 805.93 | 806.12 |
| 684 | Ac-ITF$r8FYWAQL$S-NH2 | 1607.88 | 804.94 | 805.2 |
| 685 | Ac-ITF$r8LYWSQL$S-NH2 | 1589.89 | 795.95 | 796.22 |
| 686 | Ac-FTF$r8FYWAQL$S-NH2 | 1641.86 | 821.93 | 822.41 |
| 687 | Ac-VTF$r8AYWSQL$S-NH2 | 1533.82 | 767.91 | 768.19 |
| 688 | Ac-LTF$r8AHWAQL$S-NH2 | 1505.84 | 753.92 | 754.31 |
| 689 | Ac-LTF$r8AYWAQL$H-NH2 | 1581.87 | 791.94 | 791.94 |
| 690 | Ac-LTF$r8AYWAHL$S-NH2 | 1540.84 | 771.42 | 771.61 |
| 691 | Ac-aAibWTF$r8VYWSQL$S-NH2 | 1804.96 | 903.48 | 903.9 |
| 692 | Ac-AibWTF$r8HYWAQL$S-NH2 | 1755.91 | 878.96 | 879.5 |
| 693 | Ac-AibAWTF$r8HYWAQL$S-NH2 | 1826.95 | 914.48 | 914.7 |
| 694 | Ac-fWTF$r8HYWAQL$S-NH2 | 1817.93 | 909.97 | 910.2 |
| 695 | Ac-AibWWTF$r8HYWAQL$S-NH2 | 1941.99 | 972.00 | 972.7 |
| 696 | Ac-WTF$r8LYWSQL$S-NH2 | 1662.88 | 832.44 | 832.7 |
| 697 | Ac-WTF$r8NleYWSQL$S-NH2 | 1662.88 | 832.44 | 832.7 |
| 698 | Ac-LTF$r8AYWSQL$a-NH2 | 1531.84 | 766.92 | 767.2 |
| 699 | Ac-LTF$r8EYWARL$A-NH2 | 1601.90 | 801.95 | 802.2 |
| 700 | Ac-LTF$r8EYWAHL$A-NH2 | 1582.86 | 792.43 | 792.6 |
| 701 | Ac-aTF$r8AYWAQL$S-NH2 | 1489.80 | 745.90 | 746.1 |
| 702 | Ac-AibTF$r8AYWAQL$S-NH2 | 1503.81 | 752.91 | 753.2 |
| 703 | Ac-AmfTF$r8AYWAQL$S-NH2 | 1579.84 | 790.92 | 791.2 |
| 704 | Ac-AmwTF$r8AYWAQL$S-NH2 | 1618.86 | 810.43 | 810.7 |
| 705 | Ac-NmLTF$r8AYWAQL$S-NH2 | 1545.86 | 773.93 | 774.1 |
| 706 | Ac-LNmTF$r8AYWAQL$S-NH2 | 1545.86 | 773.93 | 774.4 |
| 707 | Ac-LSarF$r8AYWAQL$S-NH2 | 1501.83 | 751.92 | 752.1 |
| 708 | Ac-TF$r8AYWAQL$S-NH2 | 1418.76 | 710.38 | 710.8 |
| 709 | Ac-ETF$r8AYWAQL$A-NH2 | 1531.81 | 766.91 | 767.4 |
| 710 | Ac-LTF$r8EYWAQL$A-NH2 | 1573.85 | 787.93 | 788.2 |
| 711 | Ac-WTF$r8VYWSQL$S-NH2 | 1648.87 | 825.44 | 825.2 |
| 713 | Ac-YTF$r8FYWSQL$S-NH2 | 1673.85 | 837.93 | 837.3 |
| 714 | Ac-F5r8AY6clWSAL$A-NH2 | 1294.65 | 648.33 | 647.74 |
| 715 | Ac-ETF$r8EYWVQL$S-NH2 | 1633.84 | 817.92 | 817.36 |
| 716 | Ac-ETF$r8EHWAQL$A-NH2 | 1563.81 | 782.91 | 782.36 |
| 717 | Ac-ITF$r8EYWAQL$S-NH2 | 1589.85 | 795.93 | 795.38 |
| 718 | Ac-ITF$r8EHWVQL$A-NH2 | 1575.88 | 788.94 | 788.42 |
| 719 | Ac-ITF$r8EHWAQL$S-NH2 | 1563.85 | 782.93 | 782.43 |
| 720 | Ac-LTF4F$r8AYWAQCba$S-NH2 | 1561.83 | 781.92 | 781.32 |
| 721 | Ac-LTF3Cl$r8AYWAQhL$S-NH2 | 1579.82 | 790.91 | 790.64 |
| 722 | Ac-LTF3Cl$r8AYWAQCha$S-NH2 | 1605.84 | 803.92 | 803.37 |
| 723 | Ac-LTF3Cl$r8AYWAQChg$S-NH2 | 1591.82 | 796.91 | 796.27 |
| 724 | Ac-LTF3Cl$r8AYWAQCba$S-NH2 | 1577.81 | 789.91 | 789.83 |
| 725 | Ac-LTF$r8AY6clWSQL$S-NH2 | 1581.80 | 791.90 | 791.75 |
| 726 | Ac-LTF4F$r8HYWAQhL$S-NH2 | 1629.87 | 815.94 | 815.36 |
| 727 | Ac-LTF4F$r8HYWAQCba$S-NH2 | 1627.86 | 814.93 | 814.32 |
| 728 | Ac-LTF4F$r8AYWAQhL$S-NH2 | 1563.85 | 782.93 | 782.36 |
| 729 | Ac-LTF4F$r8AYWAQChg$S-NH2 | 1575.85 | 788.93 | 788.35 |
| 730 | Ac-ETF$r8EYWVAL$S-NH2 | 1576.82 | 789.41 | 788.79 |
| 731 | Ac-ETF$r8EHWAAL$A-NH2 | 1506.79 | 754.40 | 754.8 |
| 732 | Ac-ITF$r8EYWAAL$S-NH2 | 1532.83 | 767.42 | 767.75 |
| 733 | Ac-ITF$r8EHWVAL$A-NH2 | 1518.86 | 760.43 | 760.81 |
| 734 | Ac-ITF$r8EHWAAL$S-NH2 | 1506.82 | 754.41 | 754.8 |
| 735 | Pam-LTF$r8EYWAQL$S-NH2 | 1786.07 | 894.04 | 894.48 |
| 736 | Pam-ETF$r8EYWAQL$S-NH2 | 1802.03 | 902.02 | 902.34 |
| 737 | Ac-LTF$r8AYWLQL$S-NH2 | 1573.89 | 787.95 | 787.39 |
| 738 | Ac-LTF$r8EYWLQL$S-NH2 | 1631.90 | 816.95 | 817.33 |
| 739 | Ac-LTF$r8EHWLQL$S-NH2 | 1605.89 | 803.95 | 804.29 |
| 740 | Ac-LTF$r8VYWAQL$S-NH2 | 1559.88 | 780.94 | 781.34 |
| 741 | Ac-LTF$r8AYWSQL$S-NH2 | 1547.84 | 774.92 | 775.33 |
| 742 | Ac-ETF$r8AYWAQL$S-NH2 | 1547.80 | 774.90 | 775.7 |
| 743 | Ac-LTF$r8EYWAQL$S-NH2 | 1589.85 | 795.93 | 796.33 |
| 744 | Ac-LTF$r8HYWAQL$S-NHAm | 1667.94 | 834.97 | 835.37 |
| 745 | Ac-LTF$r8HYWAQL$S-NHiAm | 1667.94 | 834.97 | 835.27 |
| 746 | Ac-LTF$r8HYWAQL$S-NHnPr3Ph | 1715.94 | 858.97 | 859.42 |
| 747 | Ac-LTF$r8HYWAQL$S-NHnBu3,3Me | 1681.96 | 841.98 | 842.67 |
| 748 | Ac-LTF$r8HYWAQL$S-NHnBu | 1653.93 | 827.97 | 828.24 |
| 749 | Ac-LTF$r8HYWAQL$S-NHnPr | 1639.91 | 820.96 | 821.31 |
| 750 | Ac-LTF$r8HYWAQL$S-NHnEt2Ch | 1707.98 | 854.99 | 855.35 |
| 751 | Ac-LTF$r8HYWAQL$S-NHHex | 1681.96 | 841.98 | 842.4 |
| 752 | Ac-LTF$r8AYWAQL$S-NHmdPeg2 | 1633.91 | 817.96 | 855.35 |
| 753 | Ac-LTF$r8AYWAQL$A-NHmdPeg2 | 1617.92 | 809.96 | 810.58 |
| 754 | Ac-LTF5r5AYWAALSs8S-NH2 | 1474.82 | 738.41 | 738.79 |
| 755 | Ac-LTF$r8AYWCouQL$S-NH2 | 1705.88 | 853.94 | 854.61 |
| 756 | Ac-LTF$r8CouYWAQL$S-NH2 | 1705.88 | 853.94 | 854.7 |
| 757 | Ac-CouTF$r8AYWAQL$S-NH2 | 1663.83 | 832.92 | 833.33 |
| 758 | H-LTF$r8AYWAQL$A-NH2 | 1473.84 | 737.92 | 737.29 |
| 759 | Ac-HHF$r8AYWAQL$S-NH2 | 1591.83 | 796.92 | 797.72 |
| 760 | Ac-LT2Nal$r8AYWSQL$S-NH2 | 1597.85 | 799.93 | 800.68 |
| 761 | Ac-LTF$r8HCouWAQL$S-NH2 | 1679.87 | 840.94 | 841.38 |
| 762 | Ac-LTF$r8AYWCou2QL$S-NH2 | 1789.94 | 895.97 | 896.51 |
| 763 | Ac-LTF$r8Cou2YWAQL$S-NH2 | 1789.94 | 895.97 | 896.5 |
| 764 | Ac-Cou2TF$r8AYWAQL$S-NH2 | 1747.90 | 874.95 | 875.42 |
| 765 | Ac-LTF$r8ACou2WAQL$S-NH2 | 1697.92 | 849.96 | 850.82 |
| 766 | Dmaac-LTF$r8AYWAQL$S-NH2 | 1574.89 | 788.45 | 788.82 |
| 767 | Hexac-LTF$r8AYWAQL$S-NH2 | 1587.91 | 794.96 | 795.11 |
| 768 | Napac-LTF$r8AYWAQL$S-NH2 | 1657.89 | 829.95 | 830.36 |
| 769 | Pam-LTF$r8AYWAQL$S-NH2 | 1728.06 | 865.03 | 865.45 |
| 770 | Ac-LT2Nal$r8HYAAQL$S-NH2 | 1532.84 | 767.42 | 767.61 |
| 771 | Ac-LT2Nal$/r8HYWAQLS/S-NH2 | 1675.91 | 838.96 | 839.1 |
| 772 | Ac-LT2Nal$r8HYFAQL$S-NH2 | 1608.87 | 805.44 | 805.9 |
| 773 | Ac-LT2Nal$r8HWAAQL$S-NH2 | 1555.86 | 778.93 | 779.08 |
| 774 | Ac-LT2Nal$r8HYAWQL$S-NH2 | 1647.88 | 824.94 | 825.04 |
| 775 | Ac-LT2Nal$r8HYAAQW$S-NH2 | 1605.83 | 803.92 | 804.05 |
| 776 | Ac-LTW$r8HYWAQL$S-NH2 | 1636.88 | 819.44 | 819.95 |
| 777 | Ac-LT1Nal$r8HYWAQL$S-NH2 | 1647.88 | 824.94 | 825.41 |

[0405] In some embodiments, apeptidomimetic macrocycles disclosed herein do not comprise a peptidomimetic macrocycle structure as shown in Table 2b.

[0406] Table 2c shows examples of non-crosslinked polypeptides comprising D-amino acids.

| | | | Exact | Found | Calc | Calc | Calc |
|---|---|---|---|---|---|---|---|
| SP | Sequence | Isomer | Mass | Mass | (M + 1)/1 | (M + 2)/2 | (M + 3)/3 |
| SP765 | Ac-tawyanfekllr-NH2 | | | 777.46 | | | |
| SP766 | Ac-tawyanf4CF3ekllr-NH2 | | | 811.41 | | | |

### Example 3

### X-Ray Co-Crystallography of Peptidomimetic Macrocycles in Complex with MDMX

[0407] For co-crystallization with peptide 46 (Table 2b), a stoichiometric amount of compound from a 100 mM stock solution in DMSO was added to the zebrafish MDMX protein solution and allowed to sit overnight at 4° C. before setting up crystallization experiments. Procedures were similar to those described by Popowicz et al. with some variations, as noted below. Protein (residues 15-129, L46V/V95L) was obtained from an E. coli BL21(DE3) expression system using the pET15b vector. Cells were grown at 37° C. and induced with 1 mM IPTG at an OD₆₀₀ of 0.7. Cells were allowed to grow an additional 18 hr at 23° C. Protein was purified using Ni-NT Agarose followed by Superdex 75 buffered with 50 mM NaPO₄, pH 8.0, 150 mM NaCl, 2 mM TCEP and then concentrated to 24 mg/ml. The buffer was exchanged to 20 mM Tris, pH 8.0, 50 mM NaCl, 2 mM DTT for crystallization experiments. Initial crystals were obtained with the Nextal (Qiagen) AMS screen #94 and the final optimized reservoir was 2.6 M AMS, 75 mM Hepes, pH 7.5. Crystals grew routinely as thin plates at 4° C. and were cryo-protected by pulling them through a solution containing concentrated (3.4 M) malonate followed by flash cooling, storage, and shipment in liquid nitrogen.

[0408] Data collection was performed at the APS at beamline 31-ID (SGX-CAT) at 100° K and wavelength 0.97929 Å. The beamline was equipped with a Rayonix 225-HE detector. For data collection, crystals were rotated through 180° in 1° increments using 0.8 second exposure times. Data were processed and reduced using Mosflm/scala (CCP4; see The CCP4 Suite: Programs for Protein Crystallography. Acta Crystallogr. D50, 760-763 (1994); P. R. Evans. Joint CCP4 and ESF-EACBM Newsletter 33, 22-24 (1997)) in space group C2 (unit cell: a=109.2786, b=81.0836, c=30.9058 Å, α=90, β=89.8577, γ=90°. Molecular replacement with program Molrep (CCP4; seeA. Vagin & A. Teplyakov. J. Appl. Cryst. 30, 1022-1025 (1997)) was performed with the MDMX component of the structure determined by Popowicz et al. (2Z5S; see G. M. Popowicz, A. Czarna, U. Rothweiler, A. Szwagierczak, M. Krajewski, L. Weber & T. A. Holak. Cell Cycle 6, 2386-2392 (2007)) and identified two molecules in the asymmetric unit. Initial refinement of just the two molecules of the zebrafish MDMX with program Refmac (CCP4; see G. N. Murshudov, A. A. Vagin & E. J. Dodson. Acta Crystallogr. D53, 240-255 (1997)) resulted in an R-factor of 0.3424 (R_{free}=0.3712) and rmsd values for bonds (0.018 Å) and angles (1.698°). The electron density for the stapled peptide components, starting with Gln¹⁹ and including all of the aliphatic staple, was very clear. Further refinement with CNX (Accelrys) using data to 2.3 Å resolution resulted in a model (comprised of 1448 atoms from MDMX, 272 atoms from the stapled peptides and 46 water molecules) that is well refined (R_{f}=0.2601, R_{free}=0.3162, rmsd bonds=0.007 Å and rmsd angles=0.916°).

[0409] Results from this Example are shown in FIGS. 1 and 2.

### Example 4

### Circular Dichroism (CD) Analysis of Alpha-Helicity

[0410] Peptide solutions were analyzed by CD spectroscopy using a Jasco J-815 spectropolarimeter (Jasco Inc., Easton, Md.) with the Jasco Spectra Manager Ver.2 system software. A Peltier temperature controller was used to maintain temperature control of the optical cell. Results are expressed as mean molar ellipticity [θ] (deg cm2 dmol-1) as calculated from the equation [θ]=θobs·MRW/10*1*c where θobs is the observed ellipticity in millidegrees, MRW is the mean residue weight of the peptide (peptide molecular weight/number of residues), 1 is the optical path length of the cell in centimeters, and c is the peptide concentration in mg/ml. Peptide concentrations were determined by amino acid analysis. Stock solutions of peptides were prepared in benign CD buffer (20 mM phosphoric acid, pH 2). The stocks were used to prepare peptide solutions of 0.05 mg/ml in either benign CD buffer or CD buffer with 50% trifluoroethanol (TFE) for analyses in a 10 mm pathlength cell. Variable wavelength measurements of peptide solutions were scanned at 4° C. from 195 to 250 nm, in 0.2 nm increments, and a scan rate 50 nm per minute. The average of six scans was reported.

[0411] Table 3 shows circular dichroism data for selected peptiomimetic macrocycles:

TABLE 3

| | Molar | Molar | Molar | % Helix | % Helix |
|---|---|---|---|---|---|
| | Ellipticity | Ellipticity | Ellipticity | 50% TFE | benign |
| | Benign | 50% TFE | TFE-Molar | compared to | compared to |
| | (222 in | (222 in | Ellipticity | 50% TFE | 50% TFE |
| SP# | 0% TFE) | 50% TFE) | Benign | parent (CD) | parent (CD) |
| 7 | 124 | −19921.4 | −20045.4 | 137.3 | −0.9 |
| 11 | −398.2 | −16623.4 | 16225.2 | 106.1 | 2.5 |
| 41 | −909 | −21319.4 | 20410.4 | 136 | 5.8 |
| 43 | −15334.5 | −18247.4 | 2912.9 | 116.4 | 97.8 |
| 69 | −102.6 | −21509.7 | −21407.1 | 148.2 | 0.7 |
| 71 | −121.2 | −17957 | −17835.9 | 123.7 | 0.8 |
| 154 | −916.2 | −30965.1 | −30048.9 | 213.4 | 6.3 |
| 230 | −213.2 | −17974 | −17760.8 | 123.9 | 1.5 |
| 233 | −477.9 | −19032.6 | −18554.7 | 131.2 | 3.3 |

### Example 5

### Direct Binding Assay MDM2 with Fluorescence Polarization (FP)

[0412] The assay was performed according to the following general protocol:
[0413] 1. Dilute MDM2 (In-house, 41 kD) into FP buffer (High salt buffer-200 mM Nacl, 5 mM CHAPS, pH 7.5) to make 10 μM working stock solution.
[0414] 2. Add 30 μl of 10 μM of protein stock solution into A1 and B1 well of 96-well black HE microplate (Molecular Devices).
[0415] 3. Fill in 30 μl of FP buffer into column A2 to A12, B2 to B12, C1 to C12, and D1 to D12.
[0416] 4. 2 or 3 fold series dilution of protein stock from A1, B1 into A2, B2; A2, B2 to A3, B3; . . . to reach the single digit nM concentration at the last dilution point.
[0417] 5. Dilute 1 mM (in 100% DMSO) of FAM labeled linear peptide with DMSO to 100 μM (dilution 1:10). Then, dilutefrom 100 μM to 10 μM with water (dilution 1:10) and then dilute with FP buffer from 10 μM to 40 nM (dilution 1:250). This is the working solution which will be a 10 nM concentration in well (dilution 1:4). Keep the diluted FAM labeled peptide in the dark until use.
[0418] 6. Add 10 μl of 10 nM of FAM labeled peptide into each well and incubate, and read at different time points. Kd with 5-FAM-BaLTFEHYWAQLTS-NH₂ is ˜13.38 nM.

### Example 6

### Competitive Fluorescence Polarization Assay for MDM2

[0419] The assay was performed according to the following general protocol:
[0420] 1. Dilute MDM2 (In-house, 41 kD) into FP buffer (High salt buffer-200 mM Nacl. 5 mM CHAPS, pH 7.5) to make 84 nM (2×) working stock solution.
[0421] 2. Add 20 μl of 84 nM (2×) of protein stock solution into each well of 96-well black HE microplate (Molecular Devices)
[0422] 3. Dilute 1 mM (in 100% DMSO) of FAM labeled linear peptide with DMSO to 100 μM (dilution 1:10). Then, dilute from 100 μM to 10 μM with water (dilution 1:10) and then dilute with FP buffer from 10 μM to 40 nM (dilution 1:250). This is the working solution which will be a 10 nM concentration in well (dilution 1:4). Keep the diluted FAM labeled peptide in the dark until use.
[0423] 4. Make unlabeled peptide dose plate with FP buffer starting with 1 μM (final) of peptide and making 5 fold serial dilutions for 6 points using following dilution scheme.
[0424] Dilute 10 mM (in 100% DMSO) with DMSO to 5 mM (dilution 1:2). Then, dilute from 5 mM to 500 μM with H₂O (dilution 1:10) and then dilute with FP buffer from 500 μM to 20 μM (dilution 1:25). Making 5 fold serial dilutions from 4 μM (4×) for 6 points.
[0425] 5. Transfer 10 μl of serial diluted unlabeled peptides to each well which is filled with 20 μl of 84 nM of protein.
[0426] 6. Add 10 μl of 10 nM (4×) of FAM labeled peptide into each well and incubate for 3 hr to read.

### Example 7

### Direct Binding Assay MDMX with Fluorescence Polarization (FP)

[0427] The assay was performed according to the following general protocol:
[0428] 1. Dilute MDMX (In-house, 40 kD) into FP buffer (High salt buffer-200 mM Nacl, 5 mM CHAPS, pH 7.5) to make 10 μM working stock solution.
[0429] 2. Add 30 μl of 10 μM of protein stock solution into A1 and B1 well of 96-well black HE microplate (Molecular Devices).
[0430] 3. Fill in 30 μl of FP buffer into column A2 to A12, B2 to B12, C1 to C12, and D1 to D12.
[0431] 4. 2 or 3 fold series dilution of protein stock from A1, B1 into A2, B2; A2, B2 to A3, B3; . . . to reach the single digit nM concentration at the last dilution point.
[0432] 5. Dilute 1 mM (in 100% DMSO) of FAM labeled linear peptide with DMSO to 100 μM (dilution 1:10). Then, dilute from 100 μM to 10 μM with water (dilution 1:10) and then dilute with FP buffer from 10 μM to 40 nM (dilution 1:250). This is the working solution which will be a 10 nM concentration in well (dilution 1:4). Keep the diluted FAM labeled peptide in the dark until use.
[0433] 6. Add 10 μl of 10 nM of FAM labeled peptide into each well and incubate, and read at different time points.
[0434] Kd with 5-FAM-BaLTFEHYWAQLTS-NH₂ is ˜51 nM.

### Example 8

### Competitive Fluorescence Polarization Assay for MDMX

[0435] The assay was performed according to the following general protocol:
[0436] 1. Dilute MDMX (In-house, 40 kD) into FP buffer (High salt buffer-200 mM Nacl, 5 mM CHAPS, pH 7.5.) to make 300 nM (2×) working stock solution.
[0437] 2. Add 20 μl of 300 nM (2×) of protein stock solution into each well of 96-well black HE microplate (Molecular Devices)
[0438] 3. Dilute 1 mM (in 100% DMSO) of FAM labeled linear peptide with DMSO to 100 μM (dilution 1:10). Then, dilute from 100 μM to 10 μM with water (dilution 1:10) and then dilute with FP buffer from 10 μM to 40 nM (dilution 1:250). This is the working solution which will be a 10 nM concentration in well (dilution 1:4). Keep the diluted FAM labeled peptide in the dark until use.
[0439] 4. Make unlabeled peptide dose plate with FP buffer starting with 5 μM (final) of peptide and making 5 fold serial dilutions for 6 points using following dilution scheme.
[0440] 5. Dilute 10 mM (in 100% DMSO) with DMSO to 5 mM (dilution 1:2). Then, dilute from 5 mM to 500 μM with H₂O (dilution 1:10) and then dilute with FP buffer from 500 μM to 20 μM (dilution 1:25). Making 5 fold serial dilutions from 20 μM (4×) for 6 points.
[0441] 6. Transfer 10 μl of serial diluted unlabeled peptides to each well which is filled with 20 μl of 300 nM of protein.
[0442] 7. Add 10 μl of 10 nM (4×) of FAM labeled peptide into each well and incubate for 3 hr to read. Results from Examples 5-8 are shown in Table 4. The following scale is used: “+” represents a value greater than 1000 nM, “++” represents a value greater than 100 and less than or equal to 1000 nM, “+++” represents a value greater than 10 nM and less than or equal to 100 nM, and “++++” represents a value of less than or equal to 10 nM.

TABLE 4

| SP# | IC50 (MDM2) | IC50 (MDMX) | Ki (MDM2) | Ki (MDMX) |
|---|---|---|---|---|
| 3 | ++ | ++ | +++ | +++ |
| 4 | +++ | ++ | ++++ | +++ |
| 5 | +++ | ++ | ++++ | +++ |
| 6 | ++ | ++ | +++ | +++ |
| 7 | +++ | +++ | ++++ | +++ |
| 8 | ++ | ++ | +++ | +++ |
| 9 | ++ | ++ | +++ | +++ |
| 10 | ++ | ++ | +++ | +++ |
| 11 | +++ | ++ | ++++ | +++ |
| 12 | + | + | +++ | ++ |
| 13 | ++ | ++ | +++ | ++ |
| 14 | +++ | +++ | ++++ | ++++ |
| 15 | +++ | ++ | +++ | +++ |
| 16 | +++ | +++ | ++++ | +++ |
| 17 | +++ | +++ | ++++ | +++ |
| 18 | +++ | +++ | ++++ | ++++ |
| 19 | ++ | +++ | +++ | +++ |
| 20 | ++ | ++ | +++ | +++ |
| 21 | ++ | +++ | +++ | +++ |
| 22 | +++ | +++ | ++++ | +++ |
| 23 | ++ | ++ | +++ | +++ |
| 24 | +++ | ++ | ++++ | +++ |
| 26 | +++ | ++ | ++++ | +++ |
| 28 | +++ | +++ | ++++ | +++ |
| 30 | ++ | ++ | +++ | +++ |
| 32 | +++ | ++ | ++++ | +++ |
| 38 | + | ++ | ++ | +++ |
| 39 | + | ++ | ++ | ++ |
| 40 | ++ | ++ | ++ | +++ |
| 41 | ++ | +++ | +++ | +++ |
| 42 | ++ | ++ | +++ | ++ |
| 43 | +++ | +++ | ++++ | +++ |
| 45 | +++ | +++ | ++++ | ++++ |
| 46 | +++ | +++ | ++++ | +++ |
| 47 | ++ | ++ | +++ | +++ |
| 48 | ++ | ++ | +++ | +++ |
| 49 | ++ | ++ | +++ | +++ |
| 50 | +++ | ++ | ++++ | +++ |
| 52 | +++ | +++ | ++++ | ++++ |
| 54 | ++ | ++ | +++ | +++ |
| 55 | + | + | ++ | ++ |
| 65 | +++ | ++ | ++++ | +++ |
| 68 | ++ | ++ | +++ | +++ |
| 69 | +++ | ++ | ++++ | +++ |
| 70 | ++ | ++ | ++++ | +++ |
| 71 | +++ | ++ | ++++ | +++ |
| 75 | +++ | ++ | ++++ | +++ |
| 77 | +++ | ++ | ++++ | +++ |
| 80 | +++ | ++ | ++++ | +++ |
| 81 | ++ | ++ | +++ | +++ |
| 82 | ++ | ++ | +++ | +++ |
| 85 | +++ | ++ | ++++ | +++ |
| 99 | ++++ | ++ | ++++ | +++ |
| 100 | ++ | ++ | ++++ | +++ |
| 101 | +++ | ++ | ++++ | +++ |
| 102 | ++ | ++ | ++++ | +++ |
| 103 | ++ | ++ | ++++ | +++ |
| 104 | +++ | ++ | ++++ | +++ |
| 105 | +++ | ++ | ++++ | +++ |
| 106 | ++ | ++ | +++ | +++ |
| 107 | ++ | ++ | +++ | +++ |
| 108 | +++ | ++ | ++++ | +++ |
| 109 | +++ | ++ | ++++ | +++ |
| 110 | ++ | ++ | ++++ | +++ |
| 111 | ++ | ++ | ++++ | +++ |
| 112 | ++ | ++ | +++ | +++ |
| 113 | ++ | ++ | +++ | +++ |
| 114 | +++ | ++ | ++++ | +++ |
| 115 | ++++ | ++ | ++++ | +++ |
| 116 | + | + | ++ | ++ |
| 118 | ++++ | ++ | ++++ | +++ |
| 120 | +++ | ++ | ++++ | +++ |
| 121 | ++++ | ++ | ++++ | +++ |
| 122 | ++++ | ++ | ++++ | +++ |
| 123 | ++++ | ++ | ++++ | +++ |
| 124 | ++++ | ++ | ++++ | +++ |
| 125 | ++++ | ++ | ++++ | +++ |
| 126 | ++++ | ++ | ++++ | +++ |
| 127 | ++++ | ++ | ++++ | +++ |
| 128 | ++++ | ++ | ++++ | +++ |
| 129 | ++++ | ++ | ++++ | +++ |
| 130 | ++++ | ++ | ++++ | +++ |
| 133 | ++++ | ++ | ++++ | +++ |
| 134 | ++++ | ++ | ++++ | +++ |
| 135 | ++++ | ++ | ++++ | +++ |
| 136 | ++++ | ++ | ++++ | +++ |
| 137 | ++++ | ++ | ++++ | +++ |
| 139 | ++++ | ++ | ++++ | +++ |
| 142 | ++++ | +++ | ++++ | +++ |
| 144 | ++++ | ++ | ++++ | +++ |
| 146 | ++++ | ++ | ++++ | +++ |
| 148 | ++++ | ++ | ++++ | +++ |
| 150 | ++++ | ++ | ++++ | +++ |
| 153 | ++++ | +++ | ++++ | +++ |
| 154 | ++++ | +++ | ++++ | ++++ |
| 156 | ++++ | ++ | ++++ | +++ |
| 158 | ++++ | ++ | ++++ | +++ |
| 160 | ++++ | ++ | ++++ | +++ |
| 161 | ++++ | ++ | ++++ | +++ |
| 166 | ++++ | ++ | ++++ | +++ |
| 167 | +++ | ++ | ++++ | ++ |
| 169 | ++++ | +++ | ++++ | +++ |
| 170 | ++++ | ++ | ++++ | +++ |
| 173 | ++++ | ++ | ++++ | +++ |
| 175 | ++++ | ++ | ++++ | +++ |
| 177 | +++ | ++ | ++++ | +++ |
| 180 | +++ | ++ | ++++ | +++ |
| 182 | ++++ | ++ | ++++ | +++ |
| 185 | +++ | + | ++++ | ++ |
| 186 | +++ | ++ | ++++ | +++ |
| 189 | +++ | ++ | ++++ | +++ |
| 192 | +++ | ++ | ++++ | +++ |
| 194 | +++ | ++ | ++++ | ++ |
| 196 | +++ | ++ | ++++ | +++ |
| 197 | ++++ | ++ | ++++ | +++ |
| 199 | +++ | ++ | ++++ | ++ |
| 201 | +++ | ++ | ++++ | ++ |
| 203 | +++ | ++ | ++++ | +++ |
| 204 | +++ | ++ | ++++ | +++ |
| 206 | +++ | ++ | ++++ | +++ |
| 207 | ++++ | ++ | ++++ | +++ |
| 210 | ++++ | ++ | ++++ | +++ |
| 211 | ++++ | ++ | ++++ | +++ |
| 213 | ++++ | ++ | ++++ | +++ |
| 215 | +++ | ++ | ++++ | +++ |
| 217 | ++++ | ++ | ++++ | +++ |
| 218 | ++++ | ++ | ++++ | +++ |
| 221 | ++++ | +++ | ++++ | +++ |
| 227 | ++++ | ++ | ++++ | +++ |
| 230 | ++++ | +++ | ++++ | ++++ |
| 232 | ++++ | ++ | ++++ | +++ |
| 233 | ++++ | +++ | ++++ | +++ |
| 236 | +++ | ++ | ++++ | +++ |
| 237 | +++ | ++ | ++++ | +++ |
| 238 | +++ | +++ | ++++ | +++ |
| 239 | +++ | ++ | +++ | +++ |
| 240 | +++ | ++ | ++++ | +++ |
| 241 | +++ | ++ | ++++ | +++ |
| 242 | +++ | ++ | ++++ | +++ |
| 243 | +++ | +++ | ++++ | +++ |
| 244 | +++ | +++ | ++++ | ++++ |
| 245 | +++ | +++ | ++++ | +++ |
| 246 | +++ | ++ | ++++ | +++ |
| 247 | +++ | +++ | ++++ | +++ |
| 248 | +++ | +++ | ++++ | +++ |
| 249 | +++ | +++ | ++++ | ++++ |
| 250 | ++ | + | ++ | + |
| 252 | ++ | + | ++ | + |
| 254 | +++ | ++ | ++++ | +++ |
| 255 | +++ | +++ | ++++ | +++ |
| 256 | +++ | +++ | ++++ | +++ |
| 257 | +++ | +++ | ++++ | +++ |
| 258 | +++ | ++ | ++++ | +++ |
| 259 | +++ | +++ | ++++ | +++ |
| 260 | +++ | +++ | ++++ | +++ |
| 261 | +++ | ++ | ++++ | +++ |
| 262 | +++ | ++ | ++++ | +++ |
| 263 | +++ | ++ | ++++ | +++ |
| 264 | +++ | +++ | ++++ | +++ |
| 266 | +++ | ++ | ++++ | +++ |
| 267 | +++ | +++ | ++++ | ++++ |
| 270 | ++++ | +++ | ++++ | +++ |
| 271 | ++++ | +++ | ++++ | ++++ |
| 272 | ++++ | +++ | ++++ | ++++ |
| 276 | +++ | +++ | ++++ | ++++ |
| 277 | +++ | +++ | ++++ | ++++ |
| 278 | +++ | +++ | ++++ | ++++ |
| 279 | ++++ | +++ | ++++ | +++ |
| 280 | +++ | ++ | ++++ | +++ |
| 281 | +++ | + | +++ | ++ |
| 282 | ++ | + | +++ | + |
| 283 | +++ | ++ | +++ | ++ |
| 284 | +++ | ++ | ++++ | +++ |
| 289 | +++ | +++ | ++++ | +++ |
| 291 | +++ | +++ | ++++ | ++++ |
| 293 | ++++ | +++ | ++++ | +++ |
| 306 | ++++ | ++ | ++++ | +++ |
| 308 | ++ | ++ | +++ | +++ |
| 310 | +++ | +++ | ++++ | +++ |
| 312 | +++ | ++ | +++ | +++ |
| 313 | ++++ | ++ | ++++ | +++ |
| 314 | ++++ | +++ | ++++ | ++++ |
| 315 | +++ | +++ | ++++ | +++ |
| 316 | ++++ | ++ | ++++ | +++ |
| 317 | +++ | ++ | +++ | +++ |
| 318 | +++ | ++ | +++ | +++ |
| 319 | +++ | ++ | +++ | ++ |
| 320 | +++ | ++ | +++ | ++ |
| 321 | +++ | ++ | ++++ | +++ |
| 322 | +++ | ++ | +++ | ++ |
| 323 | +++ | + | +++ | ++ |
| 328 | +++ | +++ | ++++ | +++ |
| 329 | +++ | +++ | ++++ | +++ |
| 331 | ++++ | +++ | ++++ | ++++ |
| 332 | ++++ | +++ | ++++ | ++++ |
| 334 | ++++ | +++ | ++++ | ++++ |
| 336 | ++++ | +++ | ++++ | ++++ |
| 339 | ++++ | ++ | ++++ | +++ |
| 341 | +++ | +++ | ++++ | ++++ |
| 343 | +++ | +++ | ++++ | ++++ |
| 347 | +++ | +++ | ++++ | +++ |
| 349 | ++++ | +++ | ++++ | ++++ |
| 351 | ++++ | +++ | ++++ | ++++ |
| 353 | ++++ | +++ | ++++ | ++++ |
| 355 | ++++ | +++ | ++++ | ++++ |
| 357 | ++++ | +++ | ++++ | ++++ |
| 359 | ++++ | +++ | ++++ | +++ |
| 360 | ++++ | ++++ | ++++ | ++++ |
| 363 | +++ | +++ | ++++ | ++++ |
| 364 | +++ | +++ | ++++ | ++++ |
| 365 | +++ | +++ | ++++ | ++++ |
| 366 | +++ | +++ | ++++ | +++ |
| 369 | ++ | ++ | +++ | +++ |
| 370 | +++ | +++ | ++++ | +++ |
| 371 | ++ | ++ | +++ | +++ |
| 372 | ++ | ++ | +++ | +++ |
| 373 | +++ | +++ | +++ | +++ |
| 374 | +++ | +++ | ++++ | ++++ |
| 375 | +++ | +++ | ++++ | ++++ |
| 376 | +++ | +++ | ++++ | ++++ |
| 377 | +++ | +++ | ++++ | +++ |
| 378 | +++ | +++ | ++++ | +++ |
| 379 | +++ | +++ | ++++ | +++ |
| 380 | +++ | +++ | ++++ | +++ |
| 381 | +++ | +++ | ++++ | +++ |
| 382 | +++ | +++ | ++++ | ++++ |
| 384 | ++ | + | ++ | + |
| 386 | ++ | + | ++ | + |
| 388 | ++ | +++ | +++ | ++++ |
| 390 | +++ | +++ | ++++ | +++ |
| 392 | +++ | +++ | ++++ | ++++ |
| 394 | ++++ | +++ | ++++ | ++++ |
| 396 | ++++ | ++++ | ++++ | ++++ |
| 398 | +++ | +++ | ++++ | +++ |
| 402 | ++++ | ++++ | ++++ | ++++ |
| 404 | +++ | +++ | ++++ | ++++ |
| 408 | +++ | +++ | ++++ | +++ |
| 410 | ++++ | ++++ | ++++ | ++++ |
| 411 | ++ | + | ++ | + |
| 412 | ++++ | +++ | ++++ | ++++ |
| 415 | ++++ | ++++ | ++++ | ++++ |
| 416 | +++ | +++ | ++++ | +++ |
| 417 | +++ | +++ | ++++ | +++ |
| 418 | ++++ | +++ | ++++ | ++++ |
| 419 | +++ | +++ | +++ | ++++ |
| 421 | ++++ | ++++ | ++++ | ++++ |
| 423 | +++ | +++ | ++++ | +++ |
| 425 | +++ | +++ | +++ | +++ |
| 427 | ++ | ++ | +++ | +++ |
| 432 | ++++ | +++ | ++++ | ++++ |
| 434 | +++ | +++ | ++++ | +++ |
| 435 | ++++ | +++ | ++++ | ++++ |
| 437 | +++ | +++ | ++++ | +++ |
| 439 | ++++ | +++ | ++++ | ++++ |
| 441 | ++++ | ++++ | ++++ | ++++ |
| 443 | +++ | +++ | ++++ | +++ |
| 445 | +++ | ++ | ++++ | +++ |
| 446 | +++ | + | ++++ | + |
| 447 | ++ | + | ++ | + |
| 551 | N/A | N/A | ++++ | +++ |
| 555 | N/A | N/A | ++++ | +++ |
| 556 | N/A | N/A | ++++ | +++ |
| 557 | N/A | N/A | +++ | +++ |
| 558 | N/A | N/A | +++ | +++ |
| 559 | N/A | N/A | +++ | +++ |
| 560 | N/A | N/A | + | + |
| 561 | N/A | N/A | ++++ | +++ |
| 562 | N/A | N/A | +++ | +++ |
| 563 | N/A | N/A | +++ | +++ |
| 564 | N/A | N/A | ++++ | +++ |
| 565 | N/A | N/A | +++ | +++ |
| 566 | N/A | N/A | ++++ | +++ |
| 567 | N/A | N/A | ++++ | +++ |
| 568 | N/A | N/A | ++++ | ++++ |
| 569 | N/A | N/A | ++++ | +++ |
| 570 | N/A | N/A | ++++ | +++ |
| 571 | N/A | N/A | ++++ | +++ |
| 572 | N/A | N/A | +++ | +++ |
| 573 | N/A | N/A | +++ | +++ |
| 574 | N/A | N/A | ++++ | +++ |
| 575 | N/A | N/A | ++++ | +++ |
| 576 | N/A | N/A | ++++ | +++ |
| 577 | N/A | N/A | ++++ | +++ |
| 578 | N/A | N/A | ++++ | +++ |
| 585 | N/A | N/A | +++ | +++ |
| 586 | N/A | N/A | ++++ | +++ |
| 587 | N/A | N/A | ++++ | ++++ |
| 589 | N/A | N/A | ++++ | |
| 594 | N/A | N/A | ++++ | ++++ |
| 596 | N/A | N/A | ++++ | +++ |
| 597 | N/A | N/A | ++++ | +++ |
| 598 | N/A | N/A | ++++ | +++ |
| 600 | N/A | N/A | ++++ | ++++ |
| 602 | N/A | N/A | ++++ | ++++ |
| 603 | N/A | N/A | ++++ | ++++ |
| 604 | N/A | N/A | +++ | +++ |
| 608 | N/A | N/A | ++++ | +++ |
| 609 | N/A | N/A | ++++ | +++ |
| 610 | N/A | N/A | ++++ | +++ |
| 611 | N/A | N/A | ++++ | +++ |
| 612 | N/A | N/A | ++++ | +++ |
| 613 | N/A | N/A | ++++ | +++ |
| 615 | N/A | N/A | ++++ | ++++ |
| 433 | N/A | N/A | ++++ | +++ |
| 686 | N/A | N/A | ++++ | +++ |
| 687 | N/A | N/A | ++ | ++ |
| 595 | N/A | N/A | + | N/A |
| 665 | N/A | N/A | +++ | N/A |
| 708 | N/A | N/A | +++ | +++ |
| 710 | N/A | N/A | +++ | +++ |
| 711 | N/A | N/A | +++ | ++ |
| 712 | N/A | N/A | ++++ | ++++ |
| 713 | N/A | N/A | ++++ | ++++ |
| 716 | N/A | N/A | ++++ | ++++ |
| 765 | + | + | | |
| 766 | +++ | + | | |
| 752 | ++ | + | | |
| 753 | +++ | + | | |
| 754 | ++ | + | | |
| 755 | ++++ | + | | |
| 756 | +++ | + | | |
| 757 | ++++ | + | | |
| 758 | +++ | + | | |

### Example 9

### Competition Binding ELISA (MDM2 & MDMX)

[0443] p53-His6 protein (30 nM/well) is coated overnight at room temperature in the wells of a 96-well Immulon plates. On the day of the experiment, plates are washed with 1×PBS-Tween 20 (0.05%) using an automated ELISA plate washer, blocked with ELISA Micro well Blocking for 30 minutes at room temperature; excess blocking agent is washed off by washing plates with 1×PBS-Tween 20 (0.05%). Peptides are diluted from 10 mM DMSO stocks to 500 μM working stocks in sterile water, further dilutions made in 0.5% DMSO to keep the concentration of DMSO constant across the samples. The peptides are added to wells at 2× desired concentrations in 50 μl volumes, followed by addition of diluted GST-MDM2 or GST-HMDX protein (final concentration: 10 nM). Samples are incubated at room temperature for 2 h, plates are washed with PBS-Tween 20 (0.05%) prior to adding 100 μl of HRP-conjugated anti-GST antibody [Hypromatrix, INC] diluted to 0.5 μg/ml in HRP-stabilizing buffer. Post 30 min incubation with detection antibody, plates are washed and incubated with 100 μl per well of TMB-E Substrate solution up to 30 minutes; reactions are stopped using 1M HCL and absorbance measured at 450 nm on micro plate reader. Data is analyzed using Graph Pad PRISM software.

### Example 10

### Cell Viability Assay

[0444] The assay was performed according to the following general protocol:
[0445] Cell Plating: Trypsinize, count and seed cells at the pre-determined densities in 96-well plates a day prior to assay. Following cell densities are used for each cell line in use:
[0446] SJSA-1: 7500 cells/well
[0447] RKO: 5000 cells/well
[0448] RKO-E6: 5000 cells/well
[0449] HCT-116: 5000 cells/well
[0450] SW-480: 2000 cells/well
[0451] MCF-7: 5000 cells/well

[0452] On the day of study, replace media with fresh media with 11% FBS (assay media) at room temperature. Add 180 μL of the assay media per well. Control wells with no cells, receive 200 μl media.

[0453] Peptide dilution: all dilutions are made at room temperature and added to cells at room temperature.
[0454] Prepare 10 mM stocks of the peptides in DMSO. Serially dilute the stock using 1:3 dilution scheme to get 10, 3.3, 1.1, 0.33, 0.11, 0.03, 0.01 mM solutions using DMSO as diluents. Dilute the serially DMSO-diluted peptides 33.3 times using sterile water. This gives range of 10× working stocks. Also prepare DMSO/sterile water (3% DMSO) mix for control wells.
[0455] Thus the working stocks concentration range μM will be 300, 100, 30, 10, 3, 1, 0.3 and 0 μM. Mix well at each dilution step using multichannel.
[0456] Row H has controls. H1-H3 will receive 20 ul of assay media. H4-H9 will receive 20 ul of 3% DMSO-water vehicle. H10-H12 will have media alone control with no cells.
[0457] Positive control: MDM2 small molecule inhibitor, Nutlin-3a (10 mM) is used as positive control. Nutlin was diluted using the same dilution scheme as peptides.

[0458] Addition of working stocks to cells:
[0459] Add 20 μl of 10× desired concentration to appropriate well to achieve the final concentrations in total 200 μl volume in well. (20 μl of 300 μM peptide+180 μl of cells in media=30 μM final concentration in 200 μl volume in wells). Mix gently a few times using pipette. Thus final concentration range used will be 30, 10, 3, 1, 0.3, 0.1, 0.03 & 0 μM (for potent peptides further dilutions are included).
[0460] Controls include wells that get no peptides but contain the same concentration of DMSO as the wells containing the peptides, and wells containing NO CELLS.
[0461] Incubate for 72 hours at 37° C. in humidified 5% CO₂ atmosphere.
[0462] The viability of cells is determined using MTT reagent from Promega. Viability of SJSA-1, RKO, RKO-E6, HCT-116 cells is determined on day 3, MCF-7 cells on day 5 and SW-480 cells on day 6. At the end of designated incubation time, allow the plates to come to room temperature. Remove 80 μl of assay media from each well. Add 15 μl of thawed MTT reagent to each well.
[0463] Allow plate to incubate for 2 h at 37° C. in humidified 5% CO₂ atmosphere and add 100 μl solubilization reagent as per manufacturer's protocol. Incubate with agitation for 1 h at room temperature and read on Synergy Biotek multiplate reader for absorbance at 570 nM.
[0464] Analyze the cell viability against the DMSO controls using GraphPad PRISM analysis tools.

[0465] Reagents:
[0466] Invitrogen cell culture Media
   [0467] i.Falcon 96-well clear cell culture treated plates (Nunc 353072)
[0468] DMSO (Sigma D 2650)
[0469] RPMI 1640 (Invitrogen 72400)
[0470] MTT (Promega G4000)

[0471] Instruments:

[0472] Multiplate Reader for Absorbance readout (Synergy 2).

[0473] Results from cell viability assays are shown in Tables 5 and 6. The following scale is used: “+” represents a value greater than 30 μM, “++” represents a value greater than 15 μM and less than or equal to 30 μM, “+++” represents a value greater than 5 μM and less than or equal to 15 μM, and “++++” represents a value of less than or equal to 5 μM. “IC50 ratio” represents the ratio of average IC50 in p53+/+ cells relative to average IC50 in p53−/− cells.

TABLE 5

| SP# | SJSA-1 EC50 (72 h) |
|---|---|
| 3 | +++ |
| 4 | +++ |
| 5 | ++++ |
| 6 | ++ |
| 7 | ++++ |
| 8 | +++ |
| 9 | +++ |
| 10 | +++ |
| 11 | ++++ |
| 12 | ++ |
| 13 | +++ |
| 14 | + |
| 15 | ++ |
| 16 | + |
| 17 | + |
| 18 | + |
| 19 | ++ |
| 20 | + |
| 21 | + |
| 22 | + |
| 24 | +++ |
| 26 | ++++ |
| 28 | + |
| 29 | + |
| 30 | + |
| 32 | ++ |
| 38 | + |
| 39 | + |
| 40 | + |
| 41 | + |
| 42 | + |
| 43 | ++ |
| 45 | + |
| 46 | + |
| 47 | + |
| 48 | + |
| 49 | +++ |
| 50 | ++++ |
| 52 | + |
| 54 | + |
| 55 | + |
| 65 | ++++ |
| 68 | ++++ |
| 69 | ++++ |
| 70 | ++++ |
| 71 | ++++ |
| 72 | ++++ |
| 74 | ++++ |
| 75 | ++++ |
| 77 | ++++ |
| 78 | ++ |
| 80 | ++++ |
| 81 | +++ |
| 82 | +++ |
| 83 | +++ |
| 84 | + |
| 85 | +++ |
| 99 | ++++ |
| 102 | +++ |
| 103 | +++ |
| 104 | +++ |
| 105 | +++ |
| 108 | +++ |
| 109 | +++ |
| 110 | +++ |
| 111 | ++ |
| 114 | ++++ |
| 115 | ++++ |
| 118 | ++++ |
| 120 | ++++ |
| 121 | ++++ |
| 122 | ++++ |
| 123 | ++++ |
| 124 | +++ |
| 125 | ++++ |
| 126 | ++++ |
| 127 | ++++ |
| 128 | +++ |
| 129 | ++ |
| 130 | ++++ |
| 131 | +++ |
| 132 | ++++ |
| 133 | +++ |
| 134 | +++ |
| 135 | +++ |
| 136 | ++ |
| 137 | +++ |
| 139 | ++++ |
| 142 | +++ |
| 144 | ++++ |
| 147 | ++++ |
| 148 | ++++ |
| 149 | ++++ |
| 150 | ++++ |
| 152 | +++ |
| 153 | ++++ |
| 154 | ++++ |
| 155 | ++ |
| 156 | +++ |
| 157 | +++ |
| 158 | +++ |
| 160 | ++++ |
| 161 | ++++ |
| 162 | +++ |
| 163 | +++ |
| 166 | ++ |
| 167 | +++ |
| 168 | ++ |
| 169 | ++++ |
| 170 | ++++ |
| 171 | ++ |
| 173 | +++ |
| 174 | ++++ |
| 175 | +++ |
| 176 | +++ |
| 177 | ++++ |
| 179 | +++ |
| 180 | +++ |
| 181 | +++ |
| 182 | ++++ |
| 183 | ++++ |
| 184 | +++ |
| 185 | +++ |
| 186 | ++ |
| 188 | ++ |
| 190 | ++++ |
| 192 | +++ |
| 193 | ++ |
| 194 | + |
| 195 | ++++ |
| 196 | ++++ |
| 197 | ++++ |
| 198 | ++ |
| 199 | +++ |
| 200 | +++ |
| 201 | ++++ |
| 202 | +++ |
| 203 | ++++ |
| 204 | ++++ |
| 205 | ++ |
| 206 | ++ |
| 207 | +++ |
| 208 | +++ |
| 209 | ++++ |
| 210 | +++ |
| 211 | ++++ |
| 213 | ++++ |
| 214 | ++++ |
| 215 | ++++ |
| 216 | ++++ |
| 217 | ++++ |
| 218 | ++++ |
| 219 | ++++ |
| 220 | +++ |
| 221 | ++++ |
| 222 | +++ |
| 223 | ++++ |
| 224 | ++ |
| 225 | +++ |
| 226 | ++ |
| 227 | +++ |
| 228 | ++++ |
| 229 | ++++ |
| 230 | ++++ |
| 231 | ++++ |
| 232 | ++++ |
| 233 | ++++ |
| 234 | ++++ |
| 235 | ++++ |
| 236 | ++++ |
| 237 | ++++ |
| 238 | ++++ |
| 239 | +++ |
| 240 | ++ |
| 241 | +++ |
| 242 | ++++ |
| 243 | ++++ |
| 244 | ++++ |
| 245 | ++++ |
| 246 | +++ |
| 247 | ++++ |
| 248 | ++++ |
| 249 | ++++ |
| 250 | ++ |
| 251 | + |
| 252 | + |
| 253 | + |
| 254 | +++ |
| 255 | +++ |
| 256 | ++ |
| 257 | +++ |
| 258 | +++ |
| 259 | ++ |
| 260 | ++ |
| 261 | ++ |
| 262 | +++ |
| 263 | ++ |
| 264 | ++++ |
| 266 | +++ |
| 267 | ++++ |
| 270 | ++ |
| 271 | ++ |
| 272 | ++ |
| 276 | ++ |
| 277 | ++ |
| 278 | ++ |
| 279 | ++++ |
| 280 | +++ |
| 281 | ++ |
| 282 | ++ |
| 283 | ++ |
| 284 | ++++ |
| 289 | ++++ |
| 290 | +++ |
| 291 | ++++ |
| 292 | ++++ |
| 293 | ++++ |
| 294 | ++++ |
| 295 | +++ |
| 296 | ++++ |
| 297 | +++ |
| 298 | ++++ |
| 300 | ++++ |
| 301 | ++++ |
| 302 | ++++ |
| 303 | ++++ |
| 304 | ++++ |
| 305 | ++++ |
| 306 | ++++ |
| 307 | +++ |
| 308 | ++++ |
| 309 | +++ |
| 310 | ++++ |
| 312 | ++++ |
| 313 | ++++ |
| 314 | ++++ |
| 315 | ++++ |
| 316 | ++++ |
| 317 | ++++ |
| 318 | ++++ |
| 319 | ++++ |
| 320 | ++++ |
| 321 | ++++ |
| 322 | ++++ |
| 323 | ++++ |
| 324 | ++++ |
| 326 | ++++ |
| 327 | ++++ |
| 328 | ++++ |
| 329 | ++++ |
| 330 | ++++ |
| 331 | ++++ |
| 332 | ++++ |
| 333 | ++ |
| 334 | +++ |
| 335 | ++++ |
| 336 | ++++ |
| 337 | ++++ |
| 338 | ++++ |
| 339 | ++++ |
| 340 | ++++ |
| 341 | ++++ |
| 342 | ++++ |
| 343 | ++++ |
| 344 | ++++ |
| 345 | ++++ |
| 346 | ++++ |
| 347 | ++++ |
| 348 | ++++ |
| 349 | ++++ |
| 350 | ++++ |
| 351 | ++++ |
| 352 | ++++ |
| 353 | ++++ |
| 355 | ++++ |
| 357 | ++++ |
| 358 | ++++ |
| 359 | ++++ |
| 360 | ++++ |
| 361 | +++ |
| 362 | ++++ |
| 363 | ++++ |
| 364 | ++++ |
| 365 | +++ |
| 366 | ++++ |
| 367 | ++++ |
| 368 | + |
| 369 | ++++ |
| 370 | ++++ |
| 371 | ++++ |
| 372 | +++ |
| 373 | +++ |
| 374 | ++++ |
| 375 | ++++ |
| 376 | ++++ |
| 377 | ++++ |
| 378 | ++++ |
| 379 | ++++ |
| 380 | ++++ |
| 381 | ++++ |
| 382 | ++++ |
| 386 | +++ |
| 388 | ++ |
| 390 | ++++ |
| 392 | +++ |
| 394 | +++ |
| 396 | +++ |
| 398 | +++ |
| 402 | +++ |
| 404 | +++ |
| 408 | ++++ |
| 410 | +++ |
| 411 | +++ |
| 412 | + |
| 421 | +++ |
| 423 | ++++ |
| 425 | ++++ |
| 427 | ++++ |
| 434 | +++ |
| 435 | ++++ |
| 436 | ++++ |
| 437 | ++++ |
| 438 | ++++ |
| 439 | ++++ |
| 440 | ++++ |
| 441 | ++++ |
| 442 | ++++ |
| 443 | ++++ |
| 444 | +++ |
| 445 | ++++ |
| 449 | ++++ |
| 551 | ++++ |
| 552 | ++++ |
| 554 | + |
| 555 | ++++ |
| 557 | ++++ |
| 558 | ++++ |
| 560 | + |
| 561 | ++++ |
| 562 | ++++ |
| 563 | ++++ |
| 564 | ++++ |
| 566 | ++++ |
| 567 | ++++ |
| 568 | +++ |
| 569 | ++++ |
| 571 | ++++ |
| 572 | ++++ |
| 573 | ++++ |
| 574 | ++++ |
| 575 | ++++ |
| 576 | ++++ |
| 577 | ++++ |
| 578 | ++++ |
| 585 | ++++ |
| 586 | ++++ |
| 587 | ++++ |
| 588 | ++++ |
| 589 | +++ |
| 432 | ++++ |
| 672 | + |
| 673 | ++ |
| 682 | + |
| 686 | + |
| 687 | + |
| 662 | ++++ |
| 663 | ++++ |
| 553 | +++ |
| 559 | ++++ |
| 579 | ++++ |
| 581 | ++++ |
| 582 | ++ |
| 582 | ++++ |
| 584 | +++ |
| 675 | ++++ |
| 676 | ++++ |
| 677 | + |
| 679 | ++++ |
| 700 | +++ |
| 704 | +++ |
| 591 | + |
| 706 | ++ |
| 695 | ++ |
| 595 | ++++ |
| 596 | ++++ |
| 597 | +++ |
| 598 | +++ |
| 599 | ++++ |
| 600 | ++++ |
| 601 | +++ |
| 602 | +++ |
| 603 | +++ |
| 604 | +++ |
| 606 | ++++ |
| 607 | ++++ |
| 608 | ++++ |
| 610 | ++++ |
| 611 | ++++ |
| 612 | ++++ |
| 613 | +++ |
| 614 | +++ |
| 615 | ++++ |
| 618 | ++++ |
| 619 | ++++ |
| 707 | ++++ |
| 620 | ++++ |
| 621 | ++++ |
| 622 | ++++ |
| 623 | ++++ |
| 624 | ++++ |
| 625 | ++++ |
| 626 | +++ |
| 631 | ++++ |
| 633 | ++++ |
| 634 | ++++ |
| 635 | +++ |
| 636 | +++ |
| 638 | + |
| 641 | +++ |
| 665 | ++++ |
| 708 | ++++ |
| 709 | +++ |
| 710 | + |
| 711 | ++++ |
| 712 | ++++ |
| 713 | ++++ |
| 714 | +++ |
| 715 | +++ |
| 716 | ++++ |
| 765 | + |
| 753 | + |
| 754 | + |
| 755 | + |
| 756 | + |
| 757 | ++++ |
| 758 | +++ |

TABLE 6

| | HCT-116 | RKO | RKO-E6 | SW480 | |
|---|---|---|---|---|---|
| | EC50 | EC50 | EC50 | EC50 | IC50 |
| SP# | (72 h) | (72 h) | (72 h) | (6 days) | Ratio |
| 4 | ++++ | ++++ | +++ | ++++ | |
| 5 | ++++ | ++++ | +++ | ++++ | |
| 7 | ++++ | ++++ | +++ | ++++ | |
| 10 | ++++ | +++ | +++ | +++ | |
| 11 | ++++ | ++++ | ++ | +++ | |
| 50 | ++++ | ++++ | ++ | +++ | |
| 65 | +++ | +++ | +++ | +++ | |
| 69 | ++++ | ++++ | + | ++++ | |
| 70 | ++++ | ++++ | ++ | +++ | |
| 71 | ++++ | ++++ | +++ | +++ | |
| 81 | +++ | +++ | +++ | +++ | |
| 99 | ++++ | ++++ | +++ | ++++ | |
| 109 | ++++ | ++++ | ++ | +++ | |
| 114 | | +++ | + | +++ | |
| 115 | | +++ | + | +++ | 1−29 |
| 118 | +++ | ++++ | + | ++++ | |
| 120 | ++++ | ++++ | + | ++++ | |
| 121 | ++++ | ++++ | + | ++++ | |
| 122 | | +++ | + | +++ | 1−29 |
| 125 | +++ | +++ | + | + | |
| 126 | + | + | + | + | |
| 148 | | ++ | + | + | |
| 150 | | ++ | + | + | |
| 153 | +++ | | + | | |
| 154 | +++ | +++ | + | + | 30−49 |
| 158 | + | + | + | + | |
| 160 | +++ | + | + | + | 1−29 |
| 161 | +++ | + | + | + | |
| 175 | + | + | + | + | |
| 196 | ++++ | ++++ | +++ | ++++ | |
| 219 | ++++ | +++ | + | + | 1−29 |
| 233 | ++++ | | | | |
| 237 | ++++ | | + | + | |
| 238 | ++++ | | + | + | |
| 243 | ++++ | | + | + | |
| 244 | ++++ | | + | + | ≧50 |
| 245 | ++++ | | + | + | |
| 247 | ++++ | | + | + | |
| 249 | ++++ | ++++ | + | + | ≧50 |
| 255 | ++++ | | + | | |
| 291 | | | + | | |
| 293 | +++ | | + | | |
| 303 | +++ | | + | | 1−29 |
| 305 | | | + | | |
| 306 | ++++ | | + | | |
| 310 | ++++ | | + | | |
| 312 | ++++ | | | | |
| 313 | ++++ | | ++ | | |
| 314 | | | + | | |
| 315 | ++++ | ++++ | ++ | ++++ | ≧50 |
| 316 | ++++ | ++++ | + | +++ | ≧50 |
| 317 | +++ | | + | ++ | |
| 321 | ++++ | | + | | |
| 324 | +++ | | + | | |
| 325 | +++ | | | | |
| 326 | +++ | | + | | |
| 327 | +++ | | + | | |
| 328 | +++ | | ++ | | |
| 329 | ++++ | | + | | |
| 330 | | | + | | |
| 331 | ++++ | ++++ | + | + | ≧50 |
| 338 | ++++ | ++++ | ++ | +++ | |
| 341 | +++ | ++ | + | + | |
| 343 | +++ | | + | + | |
| 346 | ++++ | | + | + | |
| 347 | +++ | | + | + | |
| 349 | ++++ | +++ | + | + | 30−49 |
| 350 | ++++ | | + | + | |
| 351 | ++++ | +++ | + | + | 30−49 |
| 353 | ++ | ++ | + | + | |
| 355 | ++++ | ++ | + | + | 1−29 |
| 357 | ++++ | ++++ | + | + | |
| 358 | ++++ | ++ | + | + | |
| 359 | ++++ | ++ | + | + | |
| 367 | ++++ | | + | + | 30−49 |
| 386 | ++++ | ++++ | ++++ | ++++ | |
| 388 | ++ | ++ | + | +++ | 1−29 |
| 390 | ++++ | ++++ | +++ | ++++ | |
| 435 | +++ | ++ | + | | |
| 436 | ++++ | ++++ | ++ | | |
| 437 | ++++ | ++++ | ++ | ++++ | 30−49 |
| 440 | ++ | ++ | + | | |
| 442 | ++++ | ++++ | ++ | | |
| 444 | ++++ | ++++ | +++ | | |
| 445 | ++++ | +++ | + | + | ≧50 |
| 555 | | | | | ≧50 |
| 557 | | | | | ≧50 |
| 558 | | | | | 30−49 |
| 562 | | | | | 30−49 |
| 564 | | | | | 30−49 |
| 566 | | | | | 30−49 |
| 567 | | | | | ≧50 |
| 572 | | | | | ≧50 |
| 573 | | | | | 30−49 |
| 578 | | | | | 30−49 |
| 662 | | | | | ≧50 |
| 379 | | | | | 1−29 |
| 375 | | | | | 1−29 |
| 559 | | | | | ≧50 |
| 561 | | | | | 1−29 |
| 563 | | | | | 1−29 |
| 568 | | | | | 1−29 |
| 569 | | | | | 1−29 |
| 571 | | | | | 1−29 |
| 574 | | | | | 1−29 |
| 575 | | | | | 1−29 |
| 576 | | | | | 1−29 |
| 577 | | | | | 30−49 |
| 433 | | | | | 1−29 |
| 551 | | | | | 30−49 |
| 553 | | | | | 1−29 |
| 710 | | | | + | |
| 711 | | | | + | |
| 712 | | | | ++ | |
| 713 | | | | ++ | |
| 714 | | | | +++ | |
| 715 | | | | +++ | |
| 716 | | | | + | |

### Example 11

### P21 ELISA Assay

[0474] The assay was performed according to the following general protocol:
[0475] Cell Plating:
[0476] Trypsinize, count and seed SJSA1 cells at the density of 7500 cells/100 μl/well in 96-well plates a day prior to assay.
[0477] On the day of study, replace media with fresh RPMI-11% FBS (assay media). Add 90 μL of the assay media per well. Control wells with no cells, receive 100 μl media.

[0478] Peptide Dilution:
[0479] Prepare 10 mM stocks of the peptides in DMSO. Serially dilute the stock using 1:3 dilution scheme to get 10, 3.3, 1.1, 0.33, 0.11, 0.03, 0.01 mM solutions using DMSO as diluents. Dilute the serially DMSO-diluted peptides 33.3 times using sterile water This gives range of 10× working stocks. Also prepare DMSO/sterile water (3% DMSO) mix for control wells.
[0480] Thus the working stocks concentration range μM will be 300, 100, 30, 10, 3, 1, 0.3 and 0 μM. Mix well at each dilution step using multichannel.
[0481] Row H has controls. H1-H3 will receive 10 ul of assay media. H4-H9 will receive 10 ul of 3% DMSO-water vehicle. H10-H12 will have media alone control with no cells.
[0482] Positive control: MDM2 small molecule inhibitor, Nutlin-3a (10 mM) is used as positive control. Nutlin was diluted using the same dilution scheme as peptides.

[0483] Addition of working stocks to cells:
[0484] Add 10 μl of 10× desired concentration to appropriate well to achieve the final concentrations in total 100 μl volume in well. (10 μl of 300 μM peptide+90 μl of cells in media=30 μM final concentration in 100 μl volume in wells). Thus final concentration range used will be 30, 10, 3, 1, 0.3& 0 μM.
[0485] Controls will include wells that get no peptides but contain the same concentration of DMSO as the wells containing the peptides, and wells containing NO CELLS.
[0486] 20 h-post incubation, aspirate the media; wash cells with 1×PBS (without Ca⁺⁺/Mg⁺⁺) and lyse in 60 μl of 1× Cell lysis buffer (Cell Signaling technologies 10× buffer diluted to 1× and supplemented with protease inhibitors and Phosphatase inhibitors) on ice for 30 min.
[0487] Centrifuge plates in at 5000 rpm speed in at 4° C. for 8 min; collect clear supernatants and freeze at −80° C. till further use.

[0488] Protein Estimation:
[0489] Total protein content of the lysates is measured using BCA protein detection kit and BSA standards from Thermofisher. Typically about 6-7 μg protein is expected per well.
[0490] Use 50 μl of the lysate per well to set up p21 ELISA.

[0491] Human Total p21 ELISA:

[0492] The ELISA assay protocol is followed as per the manufacturer's instructions. 50 μl lysate is used for each well, and each well is set up in triplicate.

[0493] Reagents:
[0494] Cell-Based Assay (−)-Nutlin-3 (10 mM): Cayman Chemicals, catalog #600034
[0495] OptiMEM, Invitrogen catalog #51985
[0496] Cell Signaling Lysis Buffer (10×), Cell signaling technology, Catalog #9803
[0497] Protease inhibitor Cocktail tablets(mini), Roche Chemicals, catalog #04693124001
[0498] Phosphatase inhibitor Cocktail tablet, Roche Chemicals, catalog #04906837001
[0499] Human total p21 ELISA kit, R&D Systems, DYC1047-5
[0500] STOP Solution (1M HCL), Cell Signaling Technologies, Catalog #7002

[0501] Instruments: Micro centrifuge-Eppendorf 5415D and Multiplate Reader for Absorbance readout (Synergy 2).

### Example 12

### Caspase 3 Detection Assay

[0502] The assay was performed according to the following general protocol:

[0503] Cell Platimg:

[0504] Trypsinize, count and seed SJSA1 cells at the density of 7500 cells/100 μL1/well in 96-well plates a day prior to assay. On the day of study, replace media with fresh RPMI-11% FBS (assay media). Add 180 μL of the assay media per well. Control wells with no cells, receive 200 μl media.

[0505] Peptide Dilution:
[0506] Prepare 10 mM stocks of the peptides in DMSO. Serially dilute the stock using 1:3 dilution scheme to get 10, 3.3, 1.1, 0.33, 0.11, 0.03, 0.01 mM solutions using DMSO as diluents. Dilute the serially DMSO-diluted peptides 33.3 times using sterile water This gives range of 10× working stocks. Also prepare DMSO/sterile water (3% DMSO) mix for control wells.
[0507] Thus the working stocks concentration range μM will be 300, 100, 30, 10, 3, 1, 0.3 and 0 μM. Mix well at each dilution step using multichannel. Add 20 ul of 10× working stocks to appropriate wells.
[0508] Row H has controls. H1-H3 will receive 20 ul of assay media. H4-H9 will receive 20 ul of 3% DMSO-water vehicle. H10-H12 will have media alone control with no cells.
[0509] Positive control: MDM2 small molecule inhibitor, Nutlin-3a (10 mM) is used as positive control. Nutlin was diluted using the same dilution scheme as peptides.

[0510] Addition of working stocks to cells:
[0511] Add 10 μl of 10× desired concentration to appropriate well to achieve the final concentrations in total 100 μl volume in well. (10 μl of 300 μM peptide+90 μl of cells in media=30 μM final concentration in 100 μl volume in wells). Thus final concentration range used will be 30, 10, 3, 1, 0.3& 0 μM.
[0512] Controls will include wells that get no peptides but contain the same concentration of DMSO as the wells containing the peptides, and wells containing NO CELLS.
[0513] 48 h-post incubation, aspirate 80 μl media from each well; add 100 μl Caspase3/7Glo assay reagent (Promega Caspase 3/7 glo assay system, G8092) per well, incubate with gentle shaking for 1 h at room temperature.
[0514] read on Synergy Biotek multiplate reader for luminescence.
[0515] Data is analyzed as Caspase 3 activation over DMSO-treated cells.

[0516] Results from Examples 11 and 12 are shown in Table 7:

TABLE 7

| | caspase | caspase | caspase | caspase | caspase | p21 | p21 | p21 | p21 | p21 |
|---|---|---|---|---|---|---|---|---|---|---|
| SP# | 0.3 uM | 1 uM | 3 uM | 10 uM | 30 uM | 0.3 uM | 1 uM | 3 uM | 10 uM | 30 uM |
| 4 | | | 9 | 37 | 35 | | | 317 | 3049 | 3257 |
| 7 | 0.93 | 1.4 | 5.08 | 21.7 | 23.96 | | 18 | 368 | 1687 | 2306 |
| 8 | | | 1 | 19 | 25 | | | 34 | 972 | 2857 |
| 10 | 1 | | 1 | 17 | 32 | | 10 | 89 | 970 | 2250 |
| 11 | 1 | | 5 | 23 | 33.5 | | 140 | 350 | 2075.5 | 3154 |
| 26 | 1 | | 1 | 3 | 14 | | | | | |
| 50 | | | 8 | 29 | 29 | | 44 | 646 | 1923 | 1818 |
| 65 | 1 | | 6 | 28 | 34 | −69 | −24 | 122 | 843 | 1472 |
| 69 | 4.34 | 9.51 | 16.39 | 26.59 | 26.11 | 272 | 458.72 | 1281.39 | 2138.88 | 1447.22 |
| 70 | | | 1 | 9 | 26 | | −19 | 68 | 828 | 1871 |
| 71 | 0.95 | 1.02 | 3.68 | 14.72 | 23.52 | | 95 | 101 | 1204 | 2075 |
| 72 | 1 | | 1 | 4 | 10 | −19 | 57 | 282 | 772 | 1045 |
| 77 | 1 | | 2 | 19 | 23 | | | | | |
| 80 | 1 | | 2 | 13 | 20 | | | | | |
| 81 | 1 | | 1 | 6 | 21 | | 0 | 0 | 417 | 1649 |
| 99 | 1 | | 7 | 31 | 33 | −19 | 117 | 370 | 996 | 1398 |
| 109 | | | 4 | 16 | 25 | | 161 | 445 | 1221 | 1680 |
| 114 | 1 | | 6 | 28 | 34 | −21 | 11 | 116 | 742 | 910 |
| 115 | 1 | | 10 | 26 | 32 | −10 | 36 | 315 | 832 | 1020 |
| 118 | 1 | | 2 | 18 | 27 | −76 | −62 | −11 | 581 | 1270 |
| 120 | 2 | | 11 | 20 | 30 | −4 | 30 | 164 | 756 | 1349 |
| 121 | 1 | | 5 | 19 | 30 | 9 | 33 | 81 | 626 | 1251 |
| 122 | 1 | | 2 | 15 | 30 | −39 | −18 | 59 | 554 | 1289 |
| 123 | 1 | | 1 | 6 | 14 | | | | | |
| 125 | 1 | | 3 | 9 | 29 | 50 | 104 | 196 | 353 | 1222 |
| 126 | 1 | | 1 | 6 | 30 | −47 | −10 | 90 | 397 | 1443 |
| 127 | 1 | | 1 | 4 | 13 | | | | | |
| 130 | 1 | | 2 | 6 | 17 | | | | | |
| 139 | 1 | | 2 | 9 | 18 | | | | | |
| 142 | 1 | | 2 | 15 | 20 | | | | | |
| 144 | 1 | | 4 | 10 | 16 | | | | | |
| 148 | 1 | | 11 | 23 | 31 | −23 | 55 | 295 | 666 | 820 |
| 149 | 1 | | 2 | 4 | 10 | 35 | 331 | 601 | 1164 | 1540 |
| 150 | 2 | | 11 | 19 | 35 | −37 | 24 | 294 | 895 | 906 |
| 153 | 2 | | 10 | 15 | 20 | | | | | |
| 154 | 2.68 | 4 | 13.93 | 19.86 | 30.14 | 414.04 | 837.45 | 1622.42 | 2149.51 | 2156.98 |
| 158 | 1 | | 1.67 | 5 | 16.33 | −1.5 | 95 | 209.5 | 654 | 1665.5 |
| 160 | 2 | | 10 | 16 | 31 | −43 | 46 | 373 | 814 | 1334 |
| 161 | 2 | | 8 | 14 | 22 | 13 | 128 | 331 | 619 | 1078 |
| 170 | 1 | | 1 | 16 | 20 | | | | | |
| 175 | 1 | | 5 | 12 | 21 | −65 | 1 | 149 | 543 | 1107 |
| 177 | 1 | | 1 | 8 | 20 | | | | | |
| 183 | 1 | | 1 | 4 | 8 | −132 | −119 | −14 | 1002 | 818 |
| 196 | 1 | | 4 | 33 | 26 | −49 | −1 | 214 | 1715 | 687 |
| 197 | 1 | | 1 | 10 | 20 | | | | | |
| 203 | 1 | | 3 | 12 | 10 | 77 | 329 | 534 | 1805 | 380 |
| 204 | 1 | | 4 | 10 | 10 | 3 | 337 | 928 | 1435 | 269 |
| 218 | 1 | | 2 | 8 | 18 | | | | | |
| 219 | 1 | | 5 | 17 | 34 | 28 | 53 | 289 | 884 | 1435 |
| 221 | 1 | | 3 | 6 | 12 | 127 | 339 | 923 | 1694 | 1701 |
| 223 | 1 | | 1 | 5 | 18 | | | | | |
| 230 | 1 | | 2 | 3 | 11 | 245.5 | 392 | 882 | 1549 | 2086 |
| 233 | 6 | 8 | 17 | 22 | 23 | 2000 | 2489 | 3528 | 3689 | 2481 |
| 237 | 1 | | 5 | 9 | 15 | 0 | 0 | 2 | 284 | 421 |
| 238 | 1 | | 2 | 4 | 21 | 0 | 149 | 128 | 825 | 2066 |
| 242 | 1 | | 4 | 5 | 18 | 0 | 0 | 35 | 577 | 595 |
| 243 | 1 | | 2 | 5 | 23 | 0 | 0 | 0 | 456 | 615 |
| 244 | 1 | | 2 | 7 | 17 | 0 | 178 | 190 | 708 | 1112 |
| 245 | 1 | | 3 | 9 | 16 | 0 | 0 | 0 | 368 | 536 |
| 247 | 1 | | 3 | 11 | 24 | 0 | 0 | 49 | 492 | 699 |
| 248 | | | | | | 0 | 50 | 22 | 174 | 1919 |
| 249 | 2 | | 5 | 11 | 23 | 0 | 0 | 100 | 907 | 1076 |
| 251 | | | | | | 0 | 0 | 0 | 0 | 0 |
| 252 | | | | | | 0 | 0 | 0 | 0 | 0 |
| 253 | | | | | | 0 | 0 | 0 | 0 | 0 |
| 254 | 1 | 3 | 7 | 14 | 22 | 118 | 896 | 1774 | 3042 | 3035 |
| 286 | 1 | 4 | 11 | 20 | 22 | 481 | 1351 | 2882 | 3383 | 2479 |
| 287 | 1 | 1 | 3 | 11 | 23 | 97 | 398 | 986 | 2828 | 3410 |
| 315 | 11 | 14.5 | 25.5 | 32 | 34 | 2110 | 2209 | 2626 | 2965 | 2635 |
| 316 | 6.5 | 10.5 | 21 | 32 | 32.5 | 1319 | 1718 | 2848 | 2918 | 2540 |
| 317 | 3 | 4 | 9 | 26 | 35 | 551 | 624 | 776 | 1367 | 1076 |
| 331 | 4.5 | 8 | 11 | 14.5 | 30.5 | 1510 | 1649 | 2027 | 2319 | 2509 |
| 338 | 1 | 5 | 23 | 20 | 29 | 660.37 | 1625.38 | 3365.87 | 2897.62 | 2727 |
| 341 | 3 | 8 | 11 | 14 | 21 | 1325.62 | 1873 | 2039.75 | 2360.75 | 2574 |
| 343 | 1 | 1 | 2 | 5 | 29 | 262 | 281 | 450 | 570 | 1199 |
| 346 | | | | | | 235.86 | 339.82 | 620.36 | 829.32 | 1695.78 |
| 347 | 2 | 3 | 5 | 8 | 29 | 374 | 622 | 659 | 905 | 1567 |
| 349 | 1 | 8 | 11 | 16 | 24 | 1039.5 | 1598.88 | 1983.75 | 2191.25 | 2576.38 |
| 351 | 3 | 9 | 13 | 15 | 24 | 1350.67 | 1710.67 | 2030.92 | 2190.67 | 2668.54 |
| 353 | 1 | 2 | 5 | 7 | 30 | 390 | 490 | 709 | 931 | 1483 |
| 355 | 1 | 4 | 11 | 13 | 30 | 191 | 688 | 1122 | 1223 | 1519 |
| 357 | 2 | 7 | 11 | 15 | 23 | 539 | 777 | 1080 | 1362 | 1177 |
| 358 | 1 | 2 | 3 | 6 | 24 | 252 | 321 | 434 | 609 | 1192 |
| 359 | 3 | 9 | 11 | 13 | 23 | 1163.29 | 1508.79 | 1780.29 | 2067.67 | 2479.29 |
| 416 | | | | | | 33.74 | 39.82 | 56.57 | 86.78 | 1275.28 |
| 417 | | | | | | 0 | 0 | 101.13 | 639.04 | 2016.58 |
| 419 | | | | | | 58.28 | 97.36 | 221.65 | 1520.69 | 2187.94 |
| 432 | | | | | | 54.86 | 68.86 | 105.11 | 440.28 | 1594.4 |

### Example 13

### Cell Lysis by Peptidomimetic Macrocycles

[0517] SJSA-1 cells were plated out one day in advance in clear flat-bottom plates (Costar, catalog number 353072) at 7500 cells/well with 100 ul/well of growth media, leaving row H columns 10-12 empty for media alone. On the day of the assay, media was exchanged with RPMI 1% FBS media, 90 uL of media per well.

[0518] 10 mM stock solutions of the peptidomimetic macrocycles were prepared in 100% DMSO. Peptidomimetic macrocycles were then diluted serially in 100% DMSO, and then further diluted 20-fold in sterile water to prepare working stock solutions in 5% DMSO/water of each peptidomimetic macrocycle at concentrations ranging from 500 uM to 62.5 uM.

[0519] 10 uL of each compound was added to the 90 uL of SJSA-1 cells to yield final concentrations of 50 uM to 6.25 uM in 0.5% DMSO-containing media. The negative control (non-lytic) sample was 0.5% DMSO alone and positive control (lytic) samples include 10 uM Melittin and 1% Triton X-100.

[0520] Cell plates were incubated for 1 hour at 37C. After the 1 hour incubation, the morphology of the cells is examined by microscope and then the plates were centrifuged at 1200 rpm for 5 minutes at room temperature. 40 uL of supernatant for each peptidomimetic macrocyle and control sample is transferred to clear assay plates. LDH release is measured using the LDH cytotoxicity assay kit from Caymen, catalog#1000882.

[0521] Results are shown in Table 8:

TABLE 8

| | 6.25 uM % | 12.5 uM % | 25 uM % | 50 uM % |
|---|---|---|---|---|
| | Lysed cells | Lysed cells | Lysed cells | Lysed cells |
| SP# | (1 h LDH) | (1 h LDH) | (1 h LDH) | (1 h LDH) |
| 3 | 1 | 0 | 1 | 3 |
| 4 | −2 | 1 | 1 | 2 |
| 6 | 1 | 1 | 1 | 1 |
| 7 | 0 | 0 | 0 | 0 |
| 8 | −1 | 0 | 1 | 1 |
| 9 | −3 | 0 | 0 | 2 |
| 11 | −2 | 1 | 2 | 3 |
| 15 | 1 | 2 | 2 | 5 |
| 18 | 0 | 1 | 2 | 4 |
| 19 | 2 | 2 | 3 | 21 |
| 22 | 0 | −1 | 0 | 0 |
| 26 | 2 | 5 | −1 | 0 |
| 32 | 0 | 0 | 2 | 0 |
| 39 | 0 | −1 | 0 | 3 |
| 43 | 0 | 0 | −1 | −1 |
| 55 | 1 | 5 | 9 | 13 |
| 65 | 0 | 0 | 0 | 2 |
| 69 | 1 | 0.5 | −0.5 | 5 |
| 71 | 0 | 0 | 0 | 0 |
| 72 | 2 | 1 | 0 | 3 |
| 75 | −1 | 3 | 1 | 1 |
| 77 | −2 | −2 | 1 | −1 |
| 80 | 0 | 1 | 1 | 5 |
| 81 | 1 | 1 | 0 | 0 |
| 82 | 0 | 0 | 0 | 1 |
| 99 | 1.5 | 3 | 2 | 3.5 |
| 108 | 0 | 0 | 0 | 1 |
| 114 | 3 | −1 | 4 | 9 |
| 115 | 0 | 1 | −1 | 6 |
| 118 | 4 | 2 | 2 | 4 |
| 120 | 0 | −1 | 0 | 6 |
| 121 | 1 | 0 | 1 | 7 |
| 122 | 1 | 3 | 0 | 6 |
| 123 | −2 | 2 | 5 | 3 |
| 125 | 0 | 1 | 0 | 2 |
| 126 | 1 | 2 | 1 | 1 |
| 130 | 1 | 3 | 0 | −1 |
| 139 | −2 | −3 | −1 | −1 |
| 142 | 1 | 0 | 1 | 3 |
| 144 | 1 | 2 | −1 | 2 |
| 147 | 8 | 9 | 16 | 55 |
| 148 | 0 | 1 | −1 | 0 |
| 149 | 6 | 7 | 7 | 21 |
| 150 | −1 | −2 | 0 | 2 |
| 153 | 4 | 3 | 2 | 3 |
| 154 | −1 | −1.5 | −1 | −1 |
| 158 | 0 | −6 | −2 | |
| 160 | −1 | 0 | −1 | 1 |
| 161 | 1 | 1 | −1 | 0 |
| 169 | 2 | 3 | 3 | 7 |
| 170 | 2 | 2 | 1 | −1 |
| 174 | 5 | 3 | 2 | 5 |
| 175 | 3 | 2 | 1 | 0 |
| 177 | −1 | −1 | 0 | 1 |
| 182 | 0 | 2 | 3 | 6 |
| 183 | 2 | 1 | 0 | 3 |
| 190 | −1 | −1 | 0 | 1 |
| 196 | 0 | −2 | 0 | 3 |
| 197 | 1 | −4 | −1 | −2 |
| 203 | 0 | −1 | 2 | 2 |
| 204 | 4 | 3 | 2 | 0 |
| 211 | 5 | 4 | 3 | 1 |
| 217 | 2 | 1 | 1 | 2 |
| 218 | 0 | −3 | −4 | 1 |
| 219 | 0 | 0 | −1 | 2 |
| 221 | 3 | 3 | 3 | 11 |
| 223 | −2 | −2 | −4 | −1 |
| 230 | 0.5 | −0.5 | 0 | 3 |
| 232 | 6 | 6 | 5 | 5 |
| 233 | 2.5 | 4.5 | 3.5 | 6 |
| 237 | 0 | 3 | 7 | 55 |
| 243 | 4 | 23 | 39 | 64 |
| 244 | 0 | 1 | 0 | 4 |
| 245 | 1 | 14 | 11 | 56 |
| 247 | 0 | 0 | 0 | 4 |
| 249 | 0 | 0 | 0 | 0 |
| 254 | 11 | 34 | 60 | 75 |
| 279 | 6 | 4 | 5 | 6 |
| 280 | 5 | 4 | 6 | 18 |
| 284 | 5 | 4 | 5 | 6 |
| 286 | 0 | 0 | 0 | 0 |
| 287 | 0 | 6 | 11 | 56 |
| 316 | 0 | 1 | 0 | 1 |
| 317 | 0 | 1 | 0 | 0 |
| 331 | 0 | 0 | 0 | 0 |
| 335 | 0 | 0 | 0 | 1 |
| 336 | 0 | 0 | 0 | 0 |
| 338 | 0 | 0 | 0 | 1 |
| 340 | 0 | 2 | 0 | 0 |
| 341 | 0 | 0 | 0 | 0 |
| 343 | 0 | 1 | 0 | 0 |
| 347 | 0 | 0 | 0 | 0 |
| 349 | 0 | 0 | 0 | 0 |
| 351 | 0 | 0 | 0 | 0 |
| 353 | 0 | 0 | 0 | 0 |
| 355 | 0 | 0 | 0 | 0 |
| 357 | 0 | 0 | 0 | 0 |
| 359 | 0 | 0 | 0 | 0 |
| 413 | 5 | 3 | 3 | 3 |
| 414 | 3 | 3 | 2 | 2 |
| 415 | 4 | 4 | 2 | 2 |

### Example 14

### p53 GRIP Assay

[0522] Thermo Scientific* Biolmage p53-MDM2 Redistribution Assay monitors the protein interaction with MDM2 and cellular translocation of GFP-tagged p53 in response to drug compounds or other stimuli. Recombinant CHO-hIR cells stably express human p53(1-312) fused to the C-terminus of enhanced green fluorescent protein (EGFP) and PDE4A4-MDM2(1-124), a fusion protein between PDE4A4 and MDM2(1-124). They provide a ready-to-use assay system for measuring the effects of experimental conditions on the interaction of p53 and MDM2. Imaging and analysis is performed with a HCS platform.

[0523] CHO-hIR cells are regularly maintained in Ham's F12 media supplemented with 1% Penicillin-Streptomycin, 0.5 mg/ml Geneticin, 1 mg/ml Zeocin and 10% FBS. Cells seeded into 96-well plates at the density of 7000 cells/100 μl per well 18-24 hours prior to running the assay using culture media. The next day, media is refreshed and PD177 is added to cells to the final concentration of 3 μM to activate foci formation. Control wells are kept without PD-177 solution. 24 h post stimulation with PD177, cells are washed once with Opti-MEM Media and 50 μL of the Opti-MEM Media supplemented with PD-177 (6 μM) is added to cells. Peptides are diluted from 10 mM DMSO stocks to 500 μM working stocks in sterile water, further dilutions made in 0.5% DMSO to keep the concentration of DMSO constant across the samples. Final highest DMSO concentration is 0.5% and is used as the negative control. Cayman Chemicals Cell-Based Assay (−)-Nutlin-3 (10 mM) is used as positive control. Nutlin was diluted using the same dilution scheme as peptides. 50 μl of 2× desired concentrations is added to the appropriate well to achieve the final desired concentrations. Cells are then incubated with peptides for 6 h at 37° C. in humidified 5% CO2 atmosphere. Post-incubation period, cells are fixed by gently aspirating out the media and adding 150 μl of fixing solution per well for 20 minutes at room temperature. Fixed cells are washed 4 times with 200 μl PBS per well each time. At the end of last wash, 100 μl of 1 μM Hoechst staining solution is added. Sealed plates incubated for at least 30 min in dark, washed with PBS to remove excess stain and PBS is added to each well. Plates can be stored at 4° C. in dark up to 3 days. The translocation of p53/MDM2 is imaged using Molecular translocation module on Cellomics Arrayscan instrument using 10× objective, XF-100 filter sets for Hoechst and GFP. The output parameters was Mean-CircRINGAveIntenRatio (the ratio of average fluorescence intensities of nucleus and cytoplasm, (well average)). The minimally acceptable number of cells per well used for image analysis was set to 500 cells.

### Example 15

### MCF-7 Breast Cancer Study using SP315, SP249 and SP154

[0524] A xenograft study was performed to test the efficacy of SP315, SP249 and SP154 in inhibiting tumor growth in athymic mice in the MCF-7 breast cancer xenograft model. A negative control stapled peptide. SP252, a point mutation of SP154 (F to A at position 19) was also tested in one group; this peptide had shown no activity in the SJSA-1 in vitro viability assay. Slow release 90 day 0.72 mg 17β-estradiol pellets (Innovative Research, Sarasota, Fla.) were implanted subcutaneously (sc) on the nape of the neck one day prior to tumor cell implantation (Day −1). On Day 0, MCF-7 tumor cells were implanted sc in the flank of female nude (Crl:NU-Foxnlnu) mice. On Day 18, the resultant sc tumors were measured using calipers to determine their length and width and the mice were weighed. The tumor sizes were calculated using the formula (length×width²)/2 and expressed as cubic millimeters (mm³). Mice with tumors smaller than 85.3 mm³ or larger than 417.4 mm³ were excluded from the subsequent group formation. Thirteen groups of mice, 10 mice per group, were formed by randomization such that the group mean tumor sizes were essentially equivalent (mean of groups±standard deviation of groups=180.7±17.5 mm³)

[0525] SP315, SP249, SP154 and SP252 dosing solutions were prepared from peptides formulated in a vehicle containing MPEG(2K)-DSPE at 50 mg/mL concentration in a 10 mM Histidine buffered saline at pH 7. This formulation was prepared once for the duration of the study. This vehicle was used as the vehicle control in the subsequent study.

[0526] Each group was assigned to a different treatment regimen. Group 1, as the vehicle negative control group, received the vehicle administered at 8 mL/kg body weight intravenously(iv) three times per week from Days 18-39. Groups 2 and 3 received SP154 as an iv injection at 30 mg/kg three times per week or 40 mg/kg twice a week, respectively. Group 4 received 6.7 mg/kg SP249 as an iv injection three times per week. Groups 5, 6, 7 and 8 received SP315 as an iv injection of 26.7 mg/kg three times per week, 20 mg/kg twice per week, 30 mg/kg twice per week, or 40 mg/kg twice per week, respectively. Group 9 received 30 mg/kg SP252 as an iv injection three times per week.

[0527] During the dosing period the mice were weighed and tumors measured 1-2 times per week. Results in terms of tumor volume are shown in FIGS. 3-6 and tumor growth inhibition compared with the vehicle group, body weight change and number of mice with ≧20% body weight loss or death are shown in Table 9. Tumor growth inhibition (TGI) was calculated as % TGI=100−[(TuVol^{Treated-day x}−TuVol^{Treated-day18})/(TuVol^{Vehicle negative control-day x}−TuVol^{Vehicle negative control-day 18})*100, where x=day that effect of treatment is being assessed. Group 1, the vehicle negative control group, showed good tumor growth rate for this tumor model.

[0528] For SP154, in the group dosed with 40 mg/kg twice a week 2 mice died during treatment, indicating that this dosing regimen was not tolerable. The dosing regimen of 30 mg/kg of SP154 three times per week was well-tolerated and yielded a TGI of 84%.

[0529] For SP249, the group dosed with 6.7 mg/kg three times per week 4 mice died during treatment, indicating that this dosing regimen was not tolerable.

[0530] All dosing regimens used for SP315 showed good tolerability, with no body weight loss or deaths noted. Dosing with 40 mg/kg of SP315 twice per week produced the highest TGI (92%). The dosing regimens of SP315 of 26.7 mg/kg three times per week, 20 mg/kg twice per week, 30 mg/kg twice per week produced TGI of 86, 82, and 85%, respectively.

[0531] For SP252, the point mutation of SP154 which shows no appreciable activity in in vitro assays, dosing with 30 mg/kg three times per week was well-tolerated with no body weight loss or deaths noted. While TGI of 88% was noted by Day 32, that TGI was reduced to 41% by Day 39.

[0532] Results from this Example are shown in FIGS. 3-6 and are summarized in Table 9.

TABLE 9

| | | | | No. with ≧20% | |
|---|---|---|---|---|---|
| Group | | % BW | No. with ≧10% | BW Loss or | |
| Number | Treatment Group | Change | BW Loss | death | % TGI |
| 1 | Vehicle | +8.6 | 0/10 | 0/10 | — |
| 2 | SP154 30 mg/kg 3×/wk iv | +5.7 | 0/10 | 0/10 | *84 |
| 3 | SP154 40 mg/kg v 2×/wk iv | N/A | 0/10 | 2/10 | Regimen |
| | | | | (2 deaths) | not |
| | | | | | tolerated |
| 4 | SP249 6.7 mg/kg 3×/wk iv | N/A | 6/10 | 4/10 | Regimen |
| | | | | | not |
| | | | | | tolerated |
| 5 | SP315 26.7 mg/kg 3×/wk iv | +3.7 | 0/10 | 0/10 | *86 |
| 6 | SP315 20 mg/kg 2×/wk iv | +3.9 | 0/10 | 0/10 | *82 |
| 7 | SP315 30 mg/kg 2×/wk iv | +8.0 | 0/10 | 0/10 | *85 |
| 8 | SP315 40 mg/kg 2×/wk iv | +2.1 | 0/10 | 0/10 | *92 |
| 9 | SP252 30 mg/kg 3×/wk iv | +3.3 | 0/10 | 0/10 | *41 |

*p ≦ 0.05 Vs Vehicle Control

### Example 21

### Solubility Determination for Peptidomimetic Macrocycles

[0533] Peptidomimetic macrocyles are first dissolved in neat N,N-dimethylacetamide (DMA, Sigma-Aldrich, 38840-1L-F) to make 20× stock solutions over a concentration range of 20-140 mg/mL. The DMA stock solutions are diluted 20-fold in an aqueous vehicle containing 2% Solutol-HS-15, 25 mM Histidine, 45 mg/mL Mannitol to obtain final concentrations of 1-7 mg/ml of the peptidomimetic macrocycles in 5% DMA, 2% Solutol-HS-15, 25 mM Histidine, 45 mg/mL Mannitol. The final solutions are mixed gently by repeat pipetting or light vortexing, and then the final solutions are sonicated for 10 min at room temperature in an ultrasonic water bath. Careful visual observation is then performed under hood light using a 7× visual amplifier to determine if precipitate exists on the bottom or as a suspension. Additional concentration ranges are tested as needed to determine the maximum solubility limit for each peptidomimetic macrocycle.

[0534] Results from this Example are shown in FIG. 7.

### Example 22

### Preparation of Peptidomimetic Macrocycles Using a Boc-Protected Amino Acid

[0535] Peptidomimetic macrocycle precursors were prepared as described in Example 2 comprising an R8 amino acid at position “i” and an S5 amino acid at position “i+7”. The amino acid at position “i+3” was a Boc-protected tryptophan which was incorporated during solid-phase synthesis. Specifically, the Boc-protected tryptophan amino acid shown below (and commercially available, for example, from Novabiochem) was using during solid phase synthesis:

[chemical structure]

[0536] Metathesis was performed using a ruthenium catalyst prior to the cleavage and deprotection steps. The composition obtained following cyclization was determined by HPLC analysis to contain primarily peptidomimetic macrocycles having a crosslinker comprising a trans olefin (“iso2”, comprising the double bond in an E configuration). Unexpectedly, a ratio of 90:10 was observed for the trans and cis products, respectively.

The application's sequence listing, which the Patent Office published only in electronic form, follows.

SEQUENCE LISTING (1501 sequences)

SEQ ID NO: 1 - protein, 19 aa, Artificial Sequence
  Description of Artificial Sequence: Synthetic peptide
  N-term Ac
  MOD_RES (7)..(7): Alpha-Me R8-octenyl-alanine olefin amino acid connected by an all-carbon crosslinker comprising one double bond
  misc_feature (7)..(14): Crosslink between residues
  MOD_RES (11)..(11): 2-aminoisobutyric acid
  MOD_RES (13)..(13): Norleucine
  MOD_RES (14)..(14): Alpha-Me S5-pentenyl-alanine olefin amino acid connected by an all-carbon crosslinker comprising one double bond
  MOD_RES (17)..(17): 2-aminoisobutyric acid
  C-term NH2
RTQATFANQWXALATNXTR

SEQ ID NO: 2 - protein, 19 aa, Artificial Sequence
  Description of Artificial Sequence: Synthetic peptide
  N-term Ac
  MOD_RES (7)..(7): Alpha-Me R8-octenyl-alanine olefin amino acid connected by an all-carbon crosslinker comprising one double bond
  misc_feature (7)..(14): Crosslink between residues
  MOD_RES (11)..(11): 2-aminoisobutyric acid
  MOD_RES (13)..(13): Norleucine
  MOD_RES (14)..(14): Alpha-Me S5-pentenyl-alanine olefin amino acid connected by an all-carbon crosslinker comprising one double bond
  MOD_RES (17)..(17): 2-aminoisobutyric acid
  C-term NH2
RTQATFANQWXALATNXTR

SEQ ID NO: 3 - protein, 16 aa, Artificial Sequence
  Description of Artificial Sequence: Synthetic peptide
  N-term Ac
  MOD_RES (1)..(1): Alpha-Me R8-octenyl-alanine olefin amino acid connected by an all-carbon crosslinker comprising one double bond
  misc_feature (1)..(8): Crosslink between residues
  MOD_RES (8)..(8): Alpha-Me S5-pentenyl-alanine olefin amino acid connected by an all-carbon crosslinker comprising one double bond
  MOD_RES (14)..(14): 2-aminoisobutyric acid
  C-term NH2
ASQQTFSALWRLLXQN

SEQ ID NO: 4 - protein, 16 aa, Artificial Sequence
  Description of Artificial Sequence: Synthetic peptide
  N-term Ac
  MOD_RES (4)..(4): Alpha-Me R8-octenyl-alanine olefin amino acid connected by an all-carbon i to i+7 crosslinker comprising one double bond
  misc_feature (4)..(11): Crosslink between residues
  MOD_RES (11)..(11): Alpha-Me S5-pentenyl-alanine olefin amino acid connected by an all-carbon crosslinker comprising one double bond
  MOD_RES (14)..(14): 2-aminoisobutyric acid
  C-term NH2
QSQATFSNLWALLXQN

SEQ ID NO: 5 - protein, 16 aa, Artificial Sequence
  Description of Artificial Sequence: Synthetic peptide
  N-term Ac
  MOD_RES (3)..(3): Alpha-Me R5-pentenyl-alanine olefin amino acid connected by an all-carbon crosslinker comprising one double bond
  misc_feature (3)..(11): Crosslink between residues
  MOD_RES (7)..(7): Two pentenyl-alanine olefin side chains, each of which is crosslinked to another amino acid as indicated
  MOD_RES (11)..(11): Alpha-Me S5-pentenyl-alanine olefin amino acid connected by an all-carbon crosslinker comprising one double bond
  MOD_RES (14)..(14): 2-aminoisobutyric acid
  C-term NH2
QSAQTFANLWALLXQN

SEQ ID NO: 6 - protein, 16 aa, Artificial Sequence
  Description of Artificial Sequence: Synthetic peptide
  N-term Ac
  MOD_RES (5)..(5): Alpha-Me R8-octenyl-alanine olefin amino acid connected by an all-carbon crosslinker comprising one double bond
  misc_feature (5)..(12): Crosslink between residues
  MOD_RES (12)..(12): Alpha-Me S5-pentenyl-alanine olefin amino acid connected by an all-carbon crosslinker comprising one double bond
  MOD_RES (14)..(14): 2-aminoisobutyric acid
  C-term NH2
QSQQAFSNLWRALXQN

SEQ ID NO: 7 - protein, 16 aa, Artificial Sequence
  Description of Artificial Sequence: Synthetic peptide
  N-term Ac
  MOD_RES (2)..(2): Alpha-Me R8-octenyl-alanine olefin amino acid connected by an all-carbon crosslinker comprising one double bond
  misc_feature (2)..(9): Crosslink between residues
  MOD_RES (9)..(9): Alpha-Me S5-pentenyl-alanine olefin amino acid connected by an all-carbon crosslinker comprising one double bond
  MOD_RES (14)..(14): 2-aminoisobutyric acid
  C-term NH2
QAQQTFSNAWRLLXQN

SEQ ID NO: 8 - protein, 10 aa, Artificial Sequence
  Description of Artificial Sequence: Synthetic peptide
  MOD_RES (2)..(2): Any amino acid
  MOD_RES (9)..(9): Any amino acid
  see specification as filed for detailed description of substitutions and preferred embodiments
FXHYWAQLXS

SEQ ID NO: 9 - protein, 10 aa, Artificial Sequence
  Description of Artificial Sequence: Synthetic peptide
  MOD_RES (2)..(2): Any amino acid
  MOD_RES (8)..(8): Leu or Cba
  MOD_RES (9)..(9): Any amino acid
  see specification as filed for detailed description of substitutions and preferred embodiments
FXEYWAQXXA

SEQ ID NO: 10 - protein, 12 aa, Artificial Sequence
  Description of Artificial Sequence: Synthetic peptide
  N-term Ac
  MOD_RES (2)..(2): Alpha-Me R8-octenyl-alanine olefin amino acid connected by an all-carbon crosslinker comprising one double bond
  misc_feature (2)..(9): Crosslink between residues
  MOD_RES (7)..(7): Ac3c
  MOD_RES (9)..(9): Alpha-Me S5-pentenyl-alanine olefin amino acid connected by an all-carbon crosslinker comprising one double bond
  C-term NH2
FAAYWEXLAAAA

SEQ ID NO: 11 - protein, 12 aa, Artificial Sequence
  Description of Artificial Sequence: Synthetic peptide
  N-term Ac
  MOD_RES (2)..(2): Alpha-Me R8-octenyl-alanine olefin amino acid connected by an all-carbon crosslinker comprising one double bond
  misc_feature (2)..(9): Crosslink between residues
  MOD_RES (7)..(7): Ac3c
  MOD_RES (9)..(9): Alpha-Me S5-pentenyl-alanine olefin amino acid connected by an all-carbon crosslinker comprising one double bond
  MOD_RES (11)..(11): 2-aminoisobutyric acid
  C-term NH2
FAAYWEXLAAXA

SEQ ID NO: 12 - protein, 14 aa, Artificial Sequence
  Description of Artificial Sequence: Synthetic peptide
  N-term Ac
  MOD_RES (4)..(4): Alpha-Me R8-octenyl-alanine olefin amino acid connected by an all-carbon crosslinker comprising one double bond
  misc_feature (4)..(11): Crosslink between residues
  MOD_RES (11)..(11): Alpha-Me S5-pentenyl-alanine olefin amino acid connected by an all-carbon crosslinker comprising one double bond
  MOD_RES (14)..(14): Norleucine
  C-term NH2
LTFAAYWAQLASAL

SEQ ID NO: 13 - protein, 14 aa, Artificial Sequence
  Description of Artificial Sequence: Synthetic peptide
  N-term Ac
  MOD_RES (4)..(4): Alpha-Me R8-octenyl-alanine olefin amino acid connected by an all-carbon crosslinker comprising one double bond
  misc_feature (4)..(11): Crosslink between residues
  MOD_RES (11)..(11): Alpha-Me S5-pentenyl-alanine olefin amino acid connected by an all-carbon crosslinker comprising one double bond
  C-term NH2
LTFAAYWAQLASAL

SEQ ID NO: 14 - protein, 14 aa, Artificial Sequence
  Description of Artificial Sequence: Synthetic peptide
  N-term Ac
  MOD_RES (4)..(4): Alpha-Me R8-octenyl-alanine olefin amino acid connected by an all-carbon crosslinker comprising one double bond
  misc_feature (4)..(11): Crosslink between residues
  MOD_RES (11)..(11): Alpha-Me S5-pentenyl-alanine olefin amino acid connected by an all-carbon crosslinker comprising one double bond
  C-term NH2
LTFAAYWAQLASAM

SEQ ID NO: 15 - protein, 14 aa, Artificial Sequence
  Description of Artificial Sequence: Synthetic peptide
  N-term Ac
  MOD_RES (4)..(4): Alpha-Me R8-octenyl-alanine olefin amino acid connected by an all-carbon crosslinker comprising one double bond
  misc_feature (4)..(11): Crosslink between residues
  MOD_RES (11)..(11): Alpha-Me S5-pentenyl-alanine olefin amino acid connected by an all-carbon crosslinker comprising one double bond
  MOD_RES (14)..(14): hLeu
  C-term NH2
LTFAAYWAQLASAL

SEQ ID NO: 16 - protein, 14 aa, Artificial Sequence
  Description of Artificial Sequence: Synthetic peptide
  N-term Ac
  MOD_RES (4)..(4): Alpha-Me R8-octenyl-alanine olefin amino acid connected by an all-carbon crosslinker comprising one double bond
  misc_feature (4)..(11): Crosslink between residues
  MOD_RES (11)..(11): Alpha-Me S5-pentenyl-alanine olefin amino acid connected by an all-carbon crosslinker comprising one double bond
  C-term NH2
LTFAAYWAQLASAF

SEQ ID NO: 17 - protein, 14 aa, Artificial Sequence
  Description of Artificial Sequence: Synthetic peptide
  N-term Ac
  MOD_RES (4)..(4): Alpha-Me R8-octenyl-alanine olefin amino acid connected by an all-carbon crosslinker comprising one double bond
  misc_feature (4)..(11): Crosslink between residues
  MOD_RES (11)..(11): Alpha-Me S5-pentenyl-alanine olefin amino acid connected by an all-carbon crosslinker comprising one double bond
  C-term NH2
LTFAAYWAQLASAI

SEQ ID NO: 18 - protein, 14 aa, Artificial Sequence
  Description of Artificial Sequence: Synthetic peptide
  N-term Ac
  MOD_RES (4)..(4): Alpha-Me R8-octenyl-alanine olefin amino acid connected by an all-carbon crosslinker comprising one double bond
  misc_feature (4)..(11): Crosslink between residues
  MOD_RES (11)..(11): Alpha-Me S5-pentenyl-alanine olefin amino acid connected by an all-carbon crosslinker comprising one double bond
  MOD_RES (14)..(14): Cyclohexyl-Gly
  C-term NH2
LTFAAYWAQLASAG

SEQ ID NO: 19 - protein, 14 aa, Artificial Sequence
  Description of Artificial Sequence: Synthetic peptide
  N-term Ac
  MOD_RES (4)..(4): Alpha-Me R8-octenyl-alanine olefin amino acid connected by an all-carbon crosslinker comprising one double bond
  misc_feature (4)..(11): Crosslink between residues
  MOD_RES (11)..(11): Alpha-Me S5-pentenyl-alanine olefin amino acid connected by an all-carbon crosslinker comprising one double bond
  MOD_RES (14)..(14): 2-aminoisobutyric acid
  C-term NH2
LTFAAYWAQLASAX

SEQ ID NO: 20 - protein, 14 aa, Artificial Sequence
  Description of Artificial Sequence: Synthetic peptide
  N-term Ac
  MOD_RES (4)..(4): Alpha-Me R8-octenyl-alanine olefin amino acid connected by an all-carbon crosslinker comprising one double bond
  misc_feature (4)..(11): Crosslink between residues
  MOD_RES (11)..(11): Alpha-Me S5-pentenyl-alanine olefin amino acid connected by an all-carbon crosslinker comprising one double bond
  C-term NH2
LTFAAYWAQLASAA

SEQ ID NO: 21 - protein, 14 aa, Artificial Sequence
  Description of Artificial Sequence: Synthetic peptide
  N-term Ac
  MOD_RES (4)..(4): Alpha-Me R8-octenyl-alanine olefin amino acid connected by an all-carbon crosslinker comprising one double bond
  misc_feature (4)..(9): Crosslink between residues
  MOD_RES (9)..(9): Alpha-Me S5-pentenyl-alanine olefin amino acid connected by an all-carbon crosslinker comprising one double bond
  MOD_RES (11)..(11): Alpha-Me S5-pentenyl-alanine olefin amino acid connected by an all-carbon crosslinker comprising one double bond
  misc_feature (11)..(13): Crosslink between residues
  MOD_RES (13)..(13): Alpha-Me S5-pentenyl-alanine olefin amino acid connected by an all-carbon crosslinker comprising one double bond
  MOD_RES (14)..(14): Norleucine
  C-term NH2
LTFAAYWAALASAL

SEQ ID NO: 22 - protein, 14 aa, Artificial Sequence
  Description of Artificial Sequence: Synthetic peptide
  N-term Ac
  MOD_RES (4)..(4): Alpha-Me R8-octenyl-alanine olefin amino acid connected by an all-carbon crosslinker comprising one double bond
  misc_feature (4)..(9): Crosslink between residues
  MOD_RES (9)..(9): Alpha-Me S5-pentenyl-alanine olefin amino acid connected by an all-carbon crosslinker comprising one double bond
  MOD_RES (11)..(11): Alpha-Me S5-pentenyl-alanine olefin amino acid connected by an all-carbon crosslinker comprising one double bond
  misc_feature (11)..(13): Crosslink between residues
  MOD_RES (13)..(13): Alpha-Me S5-pentenyl-alanine olefin amino acid connected by an all-carbon crosslinker comprising one double bond
  C-term NH2
LTFAAYWAALASAA

SEQ ID NO: 23 - protein, 12 aa, Artificial Sequence
  Description of Artificial Sequence: Synthetic peptide
  N-term Ac
  MOD_RES (2)..(2): Alpha-Me R8-octenyl-alanine olefin amino acid connected by an all-carbon crosslinker comprising one double bond
  misc_feature (2)..(9): Crosslink between residues
  MOD_RES (7)..(7): Ac3c
  MOD_RES (9)..(9): Alpha-Me S5-pentenyl-alanine olefin amino acid connected by an all-carbon crosslinker comprising one double bond
  MOD_RES (12)..(12): Norleucine
  C-term NH2
FAAYWEXLAAAL

SEQ ID NO: 24 - protein, 12 aa, Artificial Sequence
  Description of Artificial Sequence: Synthetic peptide
  N-term Ac
  MOD_RES (2)..(2): Alpha-Me R8-octenyl-alanine olefin amino acid connected by an all-carbon crosslinker comprising one double bond
  misc_feature (2)..(9): Crosslink between residues
  MOD_RES (7)..(7): Ac3c
  MOD_RES (9)..(9): Alpha-Me S5-pentenyl-alanine olefin amino acid connected by an all-carbon crosslinker comprising one double bond
  C-term NH2
FAAYWEXLAAAL

SEQ ID NO: 25 - protein, 12 aa, Artificial Sequence
  Description of Artificial Sequence: Synthetic peptide
  N-term Ac
  MOD_RES (2)..(2): Alpha-Me R8-octenyl-alanine olefin amino acid connected by an all-carbon crosslinker comprising one double bond
  misc_feature (2)..(9): Crosslink between residues
  MOD_RES (7)..(7): Ac3c
  MOD_RES (9)..(9): Alpha-Me S5-pentenyl-alanine olefin amino acid connected by an all-carbon crosslinker comprising one double bond
  C-term NH2
FAAYWEXLAAAM

SEQ ID NO: 26 - protein, 12 aa, Artificial Sequence
  Description of Artificial Sequence: Synthetic peptide
  N-term Ac
  MOD_RES (2)..(2): Alpha-Me R8-octenyl-alanine olefin amino acid connected by an all-carbon crosslinker comprising one double bond
  misc_feature (2)..(9): Crosslink between residues
  MOD_RES (7)..(7): Ac3c
  MOD_RES (9)..(9): Alpha-Me S5-pentenyl-alanine olefin amino acid connected by an all-carbon crosslinker comprising one double bond
  MOD_RES (12)..(12): hLeu
  C-term NH2
FAAYWEXLAAAL

SEQ ID NO: 27 - protein, 12 aa, Artificial Sequence
  Description of Artificial Sequence: Synthetic peptide
  N-term Ac
  MOD_RES (2)..(2): Alpha-Me R8-octenyl-alanine olefin amino acid connected by an all-carbon crosslinker comprising one double bond
  misc_feature (2)..(9): Crosslink between residues
  MOD_RES (7)..(7): Ac3c
  MOD_RES (9)..(9): Alpha-Me S5-pentenyl-alanine olefin amino acid connected by an all-carbon crosslinker comprising one double bond
  C-term NH2
FAAYWEXLAAAF

SEQ ID NO: 28 - protein, 12 aa, Artificial Sequence
  Description of Artificial Sequence: Synthetic peptide
  N-term Ac
  MOD_RES (2)..(2): Alpha-Me R8-octenyl-alanine olefin amino acid connected by an all-carbon crosslinker comprising one double bond
  misc_feature (2)..(9): Crosslink between residues
  MOD_RES (7)..(7): Ac3c
  MOD_RES (9)..(9): Alpha-Me S5-pentenyl-alanine olefin amino acid connected by an all-carbon crosslinker comprising one double bond
  C-term NH2
FAAYWEXLAAAI

SEQ ID NO: 29 - protein, 12 aa, Artificial Sequence
  Description of Artificial Sequence: Synthetic peptide
  N-term Ac
  MOD_RES (2)..(2): Alpha-Me R8-octenyl-alanine olefin amino acid connected by an all-carbon crosslinker comprising one double bond
  misc_feature (2)..(9): Crosslink between residues
  MOD_RES (7)..(7): Ac3c
  MOD_RES (9)..(9): Alpha-Me S5-pentenyl-alanine olefin amino acid connected by an all-carbon crosslinker comprising one double bond
  MOD_RES (12)..(12): Cyclohexyl-Gly
  C-term NH2
FAAYWEXLAAAG

SEQ ID NO: 30 - protein, 12 aa, Artificial Sequence
  Description of Artificial Sequence: Synthetic peptide
  N-term Ac
  MOD_RES (2)..(2): Alpha-Me R8-octenyl-alanine olefin amino acid connected by an all-carbon crosslinker comprising one double bond
  misc_feature (2)..(9): Crosslink between residues
  MOD_RES (7)..(7): Ac3c
  MOD_RES (9)..(9): Alpha-Me S5-pentenyl-alanine olefin amino acid connected by an all-carbon crosslinker comprising one double bond
  MOD_RES (12)..(12): Cyclohexyl-Ala
  C-term NH2
FAAYWEXLAAAA

SEQ ID NO: 31 - protein, 12 aa, Artificial Sequence
  Description of Artificial Sequence: Synthetic peptide
  N-term Ac
  MOD_RES (2)..(2): Alpha-Me R8-octenyl-alanine olefin amino acid connected by an all-carbon crosslinker comprising one double bond
  misc_feature (2)..(9): Crosslink between residues
  MOD_RES (7)..(7): Ac3c
  MOD_RES (9)..(9): Alpha-Me S5-pentenyl-alanine olefin amino acid connected by an all-carbon crosslinker comprising one double bond
  MOD_RES (12)..(12): 2-aminoisobutyric acid
  C-term NH2
FAAYWEXLAAAX

SEQ ID NO: 32 - protein, 15 aa, Artificial Sequence
  Description of Artificial Sequence: Synthetic peptide
  N-term Ac
  MOD_RES (4)..(4): Alpha-Me R8-octenyl-alanine olefin amino acid connected by an all-carbon crosslinker comprising one double bond
  misc_feature (4)..(11): Crosslink between residues
  MOD_RES (11)..(11): Alpha-Me S5-pentenyl-alanine olefin amino acid connected by an all-carbon crosslinker comprising one double bond
  MOD_RES (14)..(14): 2-aminoisobutyric acid
  C-term NH2
LTFAAYWAQLAAAXV

SEQ ID NO: 33 - protein, 15 aa, Artificial Sequence
  Description of Artificial Sequence: Synthetic peptide
  N-term Ac
  MOD_RES (4)..(4): Alpha-Me R8-octenyl-alanine olefin amino acid connected by an all-carbon crosslinker comprising one double bond
  misc_feature (4)..(11): Crosslink between residues
  MOD_RES (11)..(11): Alpha-Me S5-pentenyl-alanine olefin amino acid connected by an all-carbon crosslinker comprising one double bond
  MOD_RES (14)..(14): 2-aminoisobutyric acid
  C-term NH2
LTFAAYWAQLAAAXV

SEQ ID NO: 34 - protein, 15 aa, Artificial Sequence
  Description of Artificial Sequence: Synthetic peptide
  N-term Ac
  MOD_RES (4)..(4): Alpha-Me R8-octenyl-alanine olefin amino acid connected by an all-carbon crosslinker comprising one double bond
  misc_feature (4)..(11): Crosslink between residues
  MOD_RES (11)..(11): Alpha-Me S5-pentenyl-alanine olefin amino acid connected by an all-carbon crosslinker comprising one double bond
  MOD_RES (13)..(13): 2-aminoisobutyric acid
  C-term NH2
LTFAAYWAQLASXAA

SEQ ID NO: 35 - protein, 15 aa, Artificial Sequence
  Description of Artificial Sequence: Synthetic peptide
  N-term Ac
  MOD_RES (4)..(4): Alpha-Me R8-octenyl-alanine olefin amino acid connected by an all-carbon crosslinker comprising one double bond
  misc_feature (4)..(11): Crosslink between residues
  MOD_RES (11)..(11): Alpha-Me S5-pentenyl-alanine olefin amino acid connected by an all-carbon crosslinker comprising one double bond
  MOD_RES (13)..(13): 2-aminoisobutyric acid
  C-term NH2
LTFAAYWAQLASXAA

SEQ ID NO: 36 - protein, 16 aa, Artificial Sequence
  Description of Artificial Sequence: Synthetic peptide
  N-term Ac
  MOD_RES (5)..(5): Alpha-Me R8-octenyl-alanine olefin amino acid connected by an all-carbon crosslinker comprising one double bond
  misc_feature (5)..(12): Crosslink between residues
  MOD_RES (12)..(12): Alpha-Me S5-pentenyl-alanine olefin amino acid connected by an all-carbon crosslinker comprising one double bond
  MOD_RES (15)..(16): Norleucine
  C-term NH2
HLTFAHHWHQLAAALL

SEQ ID NO: 37 - protein, 16 aa, Artificial Sequence
  Description of Artificial Sequence: Synthetic peptide
  N-term Ac
  MOD_RES (5)..(5): Alpha-Me R8-octenyl-alanine olefin amino acid connected by an all-carbon crosslinker comprising one double bond
  misc_feature (5)..(12): Crosslink between residues
  MOD_RES (12)..(12): Alpha-Me S5-pentenyl-alanine olefin amino acid connected by an all-carbon crosslinker comprising one double bond
  C-term NH2
DLTFAHHWHQLARRLV

SEQ ID NO: 38 - protein, 16 aa, Artificial Sequence
  Description of Artificial Sequence: Synthetic peptide
  N-term Ac
  MOD_RES (5)..(5): Alpha-Me R8-octenyl-alanine olefin amino acid connected by an all-carbon crosslinker comprising one double bond
  misc_feature (5)..(12): Crosslink between residues
  MOD_RES (12)..(12): Alpha-Me S5-pentenyl-alanine olefin amino acid connected by an all-carbon crosslinker comprising one double bond
  C-term NH2
HHTFAHHWHQLAAAML

SEQ ID NO: 39 - protein, 13 aa, Artificial Sequence
  Description of Artificial Sequence: Synthetic peptide
  N-term Ac
  MOD_RES (2)..(2): Alpha-Me R8-octenyl-alanine olefin amino acid connected by an all-carbon crosslinker comprising one double bond
  misc_feature (2)..(9): Crosslink between residues
  MOD_RES (9)..(9): Alpha-Me S5-pentenyl-alanine olefin amino acid connected by an all-carbon crosslinker comprising one double bond
  MOD_RES (13)..(13): Cyclohexyl-Ala
  C-term NH2
FAHHWHQLARRDA

SEQ ID NO: 40 - protein, 13 aa, Artificial Sequence
  Description of Artificial Sequence: Synthetic peptide
  N-term Ac
  MOD_RES (2)..(2): Alpha-Me R8-octenyl-alanine olefin amino acid connected by an all-carbon crosslinker comprising one double bond
  misc_feature (2)..(9): Crosslink between residues
  MOD_RES (9)..(9): Alpha-Me S5-pentenyl-alanine olefin amino acid connected by an all-carbon crosslinker comprising one double bond
  C-term NH2
FAHHWHQLAHRFV

SEQ ID NO: 41 - protein, 16 aa, Artificial Sequence
  Description of Artificial Sequence: Synthetic peptide
  N-term Ac
  MOD_RES (5)..(5): Alpha-Me R8-octenyl-alanine olefin amino acid connected by an all-carbon crosslinker comprising one double bond
  misc_feature (5)..(12): Crosslink between residues
  MOD_RES (12)..(12): Alpha-Me S5-pentenyl-alanine olefin amino acid connected by an all-carbon crosslinker comprising one double bond
  MOD_RES (15)..(15): hLeu
  C-term NH2
HLTFAHHWHQLAAALA

SEQ ID NO: 42 - protein, 16 aa, Artificial Sequence
  Description of Artificial Sequence: Synthetic peptide
  N-term Ac
  MOD_RES (5)..(5): Alpha-Me R8-octenyl-alanine olefin amino acid connected by an all-carbon crosslinker comprising one double bond
  misc_feature (5)..(12): Crosslink between residues
  MOD_RES (12)..(12): Alpha-Me S5-pentenyl-alanine olefin amino acid connected by an all-carbon crosslinker comprising one double bond
  MOD_RES (15)..(15): Cyclohexyl-Gly
  MOD_RES (16)..(16): D-amino acid
  C-term NH2
DLTFAHHWHQLARRGL

SEQ ID NO: 43 - protein, 16 aa, Artificial Sequence
  Description of Artificial Sequence: Synthetic peptide
  N-term Ac
  MOD_RES (5)..(5): Alpha-Me R8-octenyl-alanine olefin amino acid connected by an all-carbon crosslinker comprising one double bond
  misc_feature (5)..(12): Crosslink between residues
  MOD_RES (12)..(12): Alpha-Me S5-pentenyl-alanine olefin amino acid connected by an all-carbon crosslinker comprising one double bond
  MOD_RES (15)..(15): Cyclohexyl-Gly
  MOD_RES (16)..(16): D-amino acid
  C-term NH2
DLTFAHHWHQLARRGL

SEQ ID NO: 44 - protein, 16 aa, Artificial Sequence
  Description of Artificial Sequence: Synthetic peptide
  N-term Ac
  MOD_RES (5)..(5): Alpha-Me R8-octenyl-alanine olefin amino acid connected by an all-carbon crosslinker comprising one double bond
  misc_feature (5)..(12): Crosslink between residues
  MOD_RES (12)..(12): Alpha-Me S5-pentenyl-alanine olefin amino acid connected by an all-carbon crosslinker comprising one double bond
  MOD_RES (15)..(15): Cyclohexyl-Ala
  MOD_RES (16)..(16): D-amino acid
  C-term NH2
HHTFAHHWHQLAAAAV

SEQ ID NO: 45 - protein, 13 aa, Artificial Sequence
  Description of Artificial Sequence: Synthetic peptide
  N-term Ac
  MOD_RES (2)..(2): Alpha-Me R8-octenyl-alanine olefin amino acid connected by an all-carbon crosslinker comprising one double bond
  misc_feature (2)..(9): Crosslink between residues
  MOD_RES (9)..(9): Alpha-Me S5-pentenyl-alanine olefin amino acid connected by an all-carbon crosslinker comprising one double bond
  MOD_RES (13)..(13): D-amino acid
  C-term NH2
FAHHWHQLARRDA

SEQ ID NO: 46 - protein, 13 aa, Artificial Sequence
  Description of Artificial Sequence: Synthetic peptide
  N-term Ac
  MOD_RES (2)..(2): Alpha-Me R8-octenyl-alanine olefin amino acid connected by an all-carbon crosslinker comprising one double bond
  misc_feature (2)..(9): Crosslink between residues
  MOD_RES (9)..(9): Alpha-Me S5-pentenyl-alanine olefin amino acid connected by an all-carbon crosslinker comprising one double bond
  MOD_RES (12)..(12): 2-aminoisobutyric acid
  C-term NH2
FAHHWHQLAHRXG

SEQ ID NO: 47 - protein, 13 aa, Artificial Sequence
  Description of Artificial Sequence: Synthetic peptide
  N-term Ac
  MOD_RES (2)..(2): Alpha-Me R8-octenyl-alanine olefin amino acid connected by an all-carbon crosslinker comprising one double bond
  misc_feature (2)..(9): Crosslink between residues
  MOD_RES (9)..(9): Alpha-Me S5-pentenyl-alanine olefin amino acid connected by an all-carbon crosslinker comprising one double bond
  MOD_RES (12)..(12): Norleucine
  C-term NH2
FAAYWAQLAHHLL

SEQ ID NO: 48 - protein, 13 aa, Artificial Sequence
  Description of Artificial Sequence: Synthetic peptide
  N-term Ac
  MOD_RES (2)..(2): Alpha-Me R8-octenyl-alanine olefin amino acid connected by an all-carbon crosslinker comprising one double bond
  misc_feature (2)..(9): Crosslink between residues
  MOD_RES (9)..(9): Alpha-Me S5-pentenyl-alanine olefin amino acid connected by an all-carbon crosslinker comprising one double bond
  MOD_RES (13)..(13): Norleucine
  C-term NH2
FAAYWSALAHQAL

SEQ ID NO: 49 - protein, 13 aa, Artificial Sequence
  Description of Artificial Sequence: Synthetic peptide
  N-term Ac
  MOD_RES (2)..(2): Alpha-Me R8-octenyl-alanine olefin amino acid connected by an all-carbon crosslinker comprising one double bond
  misc_feature (2)..(9): Crosslink between residues
  MOD_RES (9)..(9): Alpha-Me S5-pentenyl-alanine olefin amino acid connected by an all-carbon crosslinker comprising one double bond
  MOD_RES (12)..(12): Cyclohexyl-Gly
  MOD_RES (13)..(13): D-amino acid
  C-term NH2
FAAYWVQLAQHGL

SEQ ID NO: 50 - protein, 13 aa, Artificial Sequence
  Description of Artificial Sequence: Synthetic peptide
  N-term Ac
  MOD_RES (2)..(2): Alpha-Me R8-octenyl-alanine olefin amino acid connected by an all-carbon crosslinker comprising one double bond
  misc_feature (2)..(9): Crosslink between residues
  MOD_RES (9)..(9): Alpha-Me S5-pentenyl-alanine olefin amino acid connected by an all-carbon crosslinker comprising one double bond
  MOD_RES (12)..(12): Norleucine
  MOD_RES (13)..(13): D-amino acid
  C-term NH2
FAAYWTALAQQLV

SEQ ID NO: 51 - protein, 13 aa, Artificial Sequence
  Description of Artificial Sequence: Synthetic peptide
  N-term Ac
  MOD_RES (2)..(2): Alpha-Me R8-octenyl-alanine olefin amino acid connected by an all-carbon crosslinker comprising one double bond
  misc_feature (2)..(9): Crosslink between residues
  MOD_RES (9)..(9): Alpha-Me S5-pentenyl-alanine olefin amino acid connected by an all-carbon crosslinker comprising one double bond
  MOD_RES (11)..(11): 2-aminoisobutyric acid
  MOD_RES (13)..(13): D-amino acid
  C-term NH2
FAAYWYQLAHXAA

SEQ ID NO: 52 - protein, 15 aa, Artificial Sequence
  Description of Artificial Sequence: Synthetic peptide
  N-term Ac
  MOD_RES (4)..(4): Alpha-Me R8-octenyl-alanine olefin amino acid connected by an all-carbon crosslinker comprising one double bond
  misc_feature (4)..(11): Crosslink between residues
  MOD_RES (11)..(11): Alpha-Me S5-pentenyl-alanine olefin amino acid connected by an all-carbon crosslinker comprising one double bond
  MOD_RES (15)..(15): D-amino acid
  C-term NH2
LTFAAYWAQLAHHLA

SEQ ID NO: 53 - protein, 15 aa, Artificial Sequence
  Description of Artificial Sequence: Synthetic peptide
  N-term Ac
  MOD_RES (4)..(4): Alpha-Me R8-octenyl-alanine olefin amino acid connected by an all-carbon crosslinker comprising one double bond
  misc_feature (4)..(11): Crosslink between residues
  MOD_RES (11)..(11): Alpha-Me S5-pentenyl-alanine olefin amino acid connected by an all-carbon crosslinker comprising one double bond
  MOD_RES (15)..(15): D-amino acid
  C-term NH2
LTFAAYWAQLAHHLA

SEQ ID NO: 54 - protein, 15 aa, Artificial Sequence
  Description of Artificial Sequence: Synthetic peptide
  N-term Ac
  MOD_RES (4)..(4): Alpha-Me R8-octenyl-alanine olefin amino acid connected by an all-carbon crosslinker comprising one double bond
  misc_feature (4)..(11): Crosslink between residues
  MOD_RES (11)..(11): Alpha-Me S5-pentenyl-alanine olefin amino acid connected by an all-carbon crosslinker comprising one double bond
  MOD_RES (14)..(14): Norleucine
  MOD_RES (15)..(15): D-amino acid
  C-term NH2
LTFAAYWAQLAHQLV

SEQ ID NO: 55 - protein, 15 aa, Artificial Sequence
  Description of Artificial Sequence: Synthetic peptide
  N-term Ac
  MOD_RES (4)..(4): Alpha-Me R8-octenyl-alanine olefin amino acid connected by an all-carbon crosslinker comprising one double bond
  misc_feature (4)..(11): Crosslink between residues
  MOD_RES (11)..(11): Alpha-Me S5-pentenyl-alanine olefin amino acid connected by an all-carbon crosslinker comprising one double bond
  MOD_RES (14)..(14): Norleucine
  MOD_RES (15)..(15): D-amino acid
  C-term NH2
LTFAAYWAQLAHQLV

SEQ ID NO: 56 - protein, 15 aa, Artificial Sequence
  Description of Artificial Sequence: Synthetic peptide
  N-term Ac
  MOD_RES (4)..(4): Alpha-Me R8-octenyl-alanine olefin amino acid connected by an all-carbon crosslinker comprising one double bond
  misc_feature (4)..(11): Crosslink between residues
  MOD_RES (11)..(11): Alpha-Me S5-pentenyl-alanine olefin amino acid connected by an all-carbon crosslinker comprising one double bond
  MOD_RES (15)..(15): D-amino acid
  C-term NH2
LTFAAYWAQLAQQML

SEQ ID NO: 57 - protein, 15 aa, Artificial Sequence
  Description of Artificial Sequence: Synthetic peptide
  N-term Ac
  MOD_RES (4)..(4): Alpha-Me R8-octenyl-alanine olefin amino acid connected by an all-carbon crosslinker comprising one double bond
  misc_feature (4)..(11): Crosslink between residues
  MOD_RES (11)..(11): Alpha-Me S5-pentenyl-alanine olefin amino acid connected by an all-carbon crosslinker comprising one double bond
  MOD_RES (15)..(15): D-amino acid
  C-term NH2
LTFAAYWAQLAQQML

SEQ ID NO: 58 - protein, 15 aa, Artificial Sequence
  Description of Artificial Sequence: Synthetic peptide
  N-term Ac
  MOD_RES (4)..(4): Alpha-Me R8-octenyl-alanine olefin amino acid connected by an all-carbon crosslinker comprising one double bond
  misc_feature (4)..(11): Crosslink between residues
  MOD_RES (11)..(11): Alpha-Me S5-pentenyl-alanine olefin amino acid connected by an all-carbon crosslinker comprising one double bond
  MOD_RES (13)..(13): 2-aminoisobutyric acid
  MOD_RES (14)..(14): hLeu
  C-term NH2
LTFAAYWAQLAHXLV

SEQ ID NO: 59 - protein, 15 aa, Artificial Sequence
  Description of Artificial Sequence: Synthetic peptide
  N-term Ac
  MOD_RES (4)..(4): Alpha-Me R8-octenyl-alanine olefin amino acid connected by an all-carbon crosslinker comprising one double bond
  misc_feature (4)..(11): Crosslink between residues
  MOD_RES (11)..(11): Alpha-Me S5-pentenyl-alanine olefin amino acid connected by an all-carbon crosslinker comprising one double bond
  C-term NH2
LTFAAYWAQLAAHFA

SEQ ID NO: 60 - protein, 16 aa, Artificial Sequence
  Description of Artificial Sequence: Synthetic peptide
  N-term Ac
  MOD_RES (5)..(5): Alpha-Me R8-octenyl-alanine olefin amino acid connected by an all-carbon crosslinker comprising one double bond
  misc_feature (5)..(12): Crosslink between residues
  MOD_RES (12)..(12): Alpha-Me S5-pentenyl-alanine olefin amino acid connected by an all-carbon crosslinker comprising one double bond
  MOD_RES (15)..(15): Norleucine
  MOD_RES (16)..(16): D-amino acid
  C-term NH2
HLTFAHHWHQLAAALL

SEQ ID NO: 61 - protein, 16 aa, Artificial Sequence
  Description of Artificial Sequence: Synthetic peptide
  N-term Ac
  MOD_RES (5)..(5): Alpha-Me R8-octenyl-alanine olefin amino acid connected by an all-carbon crosslinker comprising one double bond
  misc_feature (5)..(12): Crosslink between residues
  MOD_RES (12)..(12): Alpha-Me S5-pentenyl-alanine olefin amino acid connected by an all-carbon crosslinker comprising one double bond
  MOD_RES (16)..(16): D-amino acid
  C-term NH2
DLTFAHHWHQLARRLA

SEQ ID NO: 62 - protein, 16 aa, Artificial Sequence
  Description of Artificial Sequence: Synthetic peptide
  N-term Ac
  MOD_RES (5)..(5): Alpha-Me R8-octenyl-alanine olefin amino acid connected by an all-carbon crosslinker comprising one double bond
  misc_feature (5)..(12): Crosslink between residues
  MOD_RES (12)..(12): Alpha-Me S5-pentenyl-alanine olefin amino acid connected by an all-carbon crosslinker comprising one double bond
  MOD_RES (16)..(16): D-amino acid
  C-term NH2
HHTFAHHWHQLAAAMV

SEQ ID NO: 63 - protein, 13 aa, Artificial Sequence
  Description of Artificial Sequence: Synthetic peptide
  N-term Ac
  MOD_RES (2)..(2): Alpha-Me R8-octenyl-alanine olefin amino acid connected by an all-carbon crosslinker comprising one double bond
  misc_feature (2)..(9): Crosslink between residues
  MOD_RES (9)..(9): Alpha-Me S5-pentenyl-alanine olefin amino acid connected by an all-carbon crosslinker comprising one double bond
  C-term NH2
FAHHWHQLARRDA

SEQ ID NO: 64 - protein, 13 aa, Artificial Sequence
  Description of Artificial Sequence: Synthetic peptide
  N-term Ac
  MOD_RES (2)..(2): Alpha-Me R8-octenyl-alanine olefin amino acid connected by an all-carbon crosslinker comprising one double bond
  misc_feature (2)..(9): Crosslink between residues
  MOD_RES (9)..(9): Alpha-Me S5-pentenyl-alanine olefin amino acid connected by an all-carbon crosslinker comprising one double bond
  MOD_RES (13)..(13): Cyclohexyl-Ala
  C-term NH2
FAHHWHQLAHRFA

SEQ ID NO: 65 - protein, 11 aa, Artificial Sequence
  Description of Artificial Sequence: Synthetic peptide
  N-term Ac
  MOD_RES (2)..(2): Alpha-Me R8-octenyl-alanine olefin amino acid connected by an all-carbon crosslinker comprising one double bond
  misc_feature (2)..(9): Crosslink between residues
  MOD_RES (9)..(9): Alpha-Me S5-pentenyl-alanine olefin amino acid connected by an all-carbon crosslinker comprising one double bond
  C-term NHAm
FAAYWEALAAA

SEQ ID NO: 66 - protein, 11 aa, Artificial Sequence
  Description of Artificial Sequence: Synthetic peptide
  N-term Ac
  MOD_RES (2)..(2): Alpha-Me R8-octenyl-alanine olefin amino acid connected by an all-carbon crosslinker comprising one double bond
  misc_feature (2)..(9): Crosslink between residues
  MOD_RES (9)..(9): Alpha-Me S5-pentenyl-alanine olefin amino acid connected by an all-carbon crosslinker comprising one double bond
  C-term NHiAm
FAAYWEALAAA

SEQ ID NO: 67 - protein, 11 aa, Artificial Sequence
  Description of Artificial Sequence: Synthetic peptide
  N-term Ac
  MOD_RES (2)..(2): Alpha-Me R8-octenyl-alanine olefin amino acid connected by an all-carbon crosslinker comprising one double bond
  misc_feature (2)..(9): Crosslink between residues
  MOD_RES (9)..(9): Alpha-Me S5-pentenyl-alanine olefin amino acid connected by an all-carbon crosslinker comprising one double bond
  C-term NHnPr3Ph
FAAYWEALAAA

SEQ ID NO: 68 - protein, 11 aa, Artificial Sequence
  Description of Artificial Sequence: Synthetic peptide
  N-term Ac
  MOD_RES (2)..(2): Alpha-Me R8-octenyl-alanine olefin amino acid connected by an all-carbon crosslinker comprising one double bond
  misc_feature (2)..(9): Crosslink between residues
  MOD_RES (9)..(9): Alpha-Me S5-pentenyl-alanine olefin amino acid connected by an all-carbon crosslinker comprising one double bond
  C-term NHnBu33Me
FAAYWEALAAA

SEQ ID NO: 69 - protein, 11 aa, Artificial Sequence
  Description of Artificial Sequence: Synthetic peptide
  N-term Ac
  MOD_RES (2)..(2): Alpha-Me R8-octenyl-alanine olefin amino acid connected by an all-carbon crosslinker comprising one double bond
  misc_feature (2)..(9): Crosslink between residues
  MOD_RES (9)..(9): Alpha-Me S5-pentenyl-alanine olefin amino acid connected by an all-carbon crosslinker comprising one double bond
  C-term NHnPr
FAAYWEALAAA

SEQ ID NO: 70 - protein, 11 aa, Artificial Sequence
  Description of Artificial Sequence: Synthetic peptide
  N-term Ac
  MOD_RES (2)..(2): Alpha-Me R8-octenyl-alanine olefin amino acid connected by an all-carbon crosslinker comprising one double bond
  misc_feature (2)..(9): Crosslink between residues
  MOD_RES (9)..(9): Alpha-Me S5-pentenyl-alanine olefin amino acid connected by an all-carbon crosslinker comprising one double bond
  C-term NHnEt2Ch
FAAYWEALAAA

SEQ ID NO: 71 - protein, 11 aa, Artificial Sequence
  Description of Artificial Sequence: Synthetic peptide
  N-term Ac
  MOD_RES (2)..(2): Alpha-Me R8-octenyl-alanine olefin amino acid connected by an all-carbon crosslinker comprising one double bond
  misc_feature (2)..(9): Crosslink between residues
  MOD_RES (9)..(9): Alpha-Me S5-pentenyl-alanine olefin amino acid connected by an all-carbon crosslinker comprising one double bond
  C-term NHnEt2Cp
FAAYWEALAAA

SEQ ID NO: 72 - protein, 11 aa, Artificial Sequence
  Description of Artificial Sequence: Synthetic peptide
  N-term Ac
  MOD_RES (2)..(2): Alpha-Me R8-octenyl-alanine olefin amino acid connected by an all-carbon crosslinker comprising one double bond
  misc_feature (2)..(9): Crosslink between residues
  MOD_RES (9)..(9): Alpha-Me S5-pentenyl-alanine olefin amino acid connected by an all-carbon crosslinker comprising one double bond
  C-term NHHex
FAAYWEALAAA

SEQ ID NO: 73 - protein, 15 aa, Artificial Sequence
  Description of Artificial Sequence: Synthetic peptide
  N-term Ac
  MOD_RES (4)..(4): Alpha-Me R8-octenyl-alanine olefin amino acid connected by an all-carbon crosslinker comprising one double bond
  misc_feature (4)..(11): Crosslink between residues
  MOD_RES (11)..(11): Alpha-Me S5-pentenyl-alanine olefin amino acid connected by an all-carbon crosslinker comprising one double bond
  C-term NH2
LTFAAYWAQLAAAIA

SEQ ID NO: 74 - protein, 15 aa, Artificial Sequence
  Description of Artificial Sequence: Synthetic peptide
  N-term Ac
  MOD_RES (4)..(4): Alpha-Me R8-octenyl-alanine olefin amino acid connected by an all-carbon crosslinker comprising one double bond
  misc_feature (4)..(11): Crosslink between residues
  MOD_RES (11)..(11): Alpha-Me S5-pentenyl-alanine olefin amino acid connected by an all-carbon crosslinker comprising one double bond
  C-term NH2
LTFAAYWAQLAAAIA

SEQ ID NO: 75 - protein, 15 aa, Artificial Sequence
  Description of Artificial Sequence: Synthetic peptide
  N-term Ac
  MOD_RES (4)..(4): Alpha-Me R8-octenyl-alanine olefin amino acid connected by an all-carbon crosslinker comprising one double bond
  misc_feature (4)..(11): Crosslink between residues
  MOD_RES (11)..(11): Alpha-Me S5-pentenyl-alanine olefin amino acid connected by an all-carbon crosslinker comprising one double bond
  C-term NH2
LTFAAYWAALAAAMA

SEQ ID NO: 76 - protein, 15 aa, Artificial Sequence
  Description of Artificial Sequence: Synthetic peptide
  N-term Ac
  MOD_RES (4)..(4): Alpha-Me R8-octenyl-alanine olefin amino acid connected by an all-carbon crosslinker comprising one double bond
  misc_feature (4)..(11): Crosslink between residues
  MOD_RES (11)..(11): Alpha-Me S5-pentenyl-alanine olefin amino acid connected by an all-carbon crosslinker comprising one double bond
  C-term NH2
LTFAAYWAALAAAMA

SEQ ID NO: 77 - protein, 15 aa, Artificial Sequence
  Description of Artificial Sequence: Synthetic peptide
  N-term Ac
  MOD_RES (4)..(4): Alpha-Me R8-octenyl-alanine olefin amino acid connected by an all-carbon crosslinker comprising one double bond
  misc_feature (4)..(11): Crosslink between residues
  MOD_RES (11)..(11): Alpha-Me S5-pentenyl-alanine olefin amino acid connected by an all-carbon crosslinker comprising one double bond
  MOD_RES (14)..(14): Norleucine
  C-term NH2
LTFAAYWAQLAAALA

SEQ ID NO: 78 - protein, 15 aa, Artificial Sequence
  Description of Artificial Sequence: Synthetic peptide
  N-term Ac
  MOD_RES (4)..(4): Alpha-Me R8-octenyl-alanine olefin amino acid connected by an all-carbon crosslinker comprising one double bond
  misc_feature (4)..(11): Crosslink between residues
  MOD_RES (11)..(11): Alpha-Me S5-pentenyl-alanine olefin amino acid connected by an all-carbon crosslinker comprising one double bond
  MOD_RES (14)..(14): Norleucine
  C-term NH2
LTFAAYWAQLAAALA

SEQ ID NO: 79 - protein, 15 aa, Artificial Sequence
  Description of Artificial Sequence: Synthetic peptide
  N-term Ac
  MOD_RES (4)..(4): Alpha-Me R8-octenyl-alanine olefin amino acid connected by an all-carbon crosslinker comprising one double bond
  misc_feature (4)..(11): Crosslink between residues
  MOD_RES (11)..(11): Alpha-Me S5-pentenyl-alanine olefin amino acid connected by an all-carbon crosslinker comprising one double bond
  MOD_RES (15)..(15): D-amino acid
  C-term NH2
LTFAAYWAQLAAAIA

SEQ ID NO: 80 - protein, 15 aa, Artificial Sequence
  Description of Artificial Sequence: Synthetic peptide
  N-term Ac
  MOD_RES (4)..(4): Alpha-Me R8-octenyl-alanine olefin amino acid connected by an all-carbon crosslinker comprising one double bond
  misc_feature (4)..(11): Crosslink between residues
  MOD_RES (11)..(11): Alpha-Me S5-pentenyl-alanine olefin amino acid connected by an all-carbon crosslinker comprising one double bond
  MOD_RES (15)..(15): D-amino acid
  C-term NH2
LTFAAYWAQLAAAIA

SEQ ID NO: 81 - protein, 15 aa, Artificial Sequence
  Description of Artificial Sequence: Synthetic peptide
  N-term Ac
  MOD_RES (4)..(4): Alpha-Me R8-octenyl-alanine olefin amino acid connected by an all-carbon crosslinker comprising one double bond
  misc_feature (4)..(11): Crosslink between residues
  MOD_RES (11)..(11): Alpha-Me S5-pentenyl-alanine olefin amino acid connected by an all-carbon crosslinker comprising one double bond
  MOD_RES (15)..(15): D-amino acid
  C-term NH2
LTFAAYWAALAAAMA

SEQ ID NO: 82 - protein, 15 aa, Artificial Sequence
  Description of Artificial Sequence: Synthetic peptide
  N-term Ac
  MOD_RES (4)..(4): Alpha-Me R8-octenyl-alanine olefin amino acid connected by an all-carbon crosslinker comprising one double bond
  misc_feature (4)..(11): Crosslink between residues
  MOD_RES (11)..(11): Alpha-Me S5-pentenyl-alanine olefin amino acid connected by an all-carbon crosslinker comprising one double bond
  MOD_RES (15)..(15): D-amino acid
  C-term NH2
LTFAAYWAALAAAMA

SEQ ID NO: 83 - protein, 15 aa, Artificial Sequence
  Description of Artificial Sequence: Synthetic peptide
  N-term Ac
  MOD_RES (4)..(4): Alpha-Me R8-octenyl-alanine olefin amino acid connected by an all-carbon crosslinker comprising one double bond
  misc_feature (4)..(11): Crosslink between residues
  MOD_RES (11)..(11): Alpha-Me S5-pentenyl-alanine olefin amino acid connected by an all-carbon crosslinker comprising one double bond
  MOD_RES (14)..(14): Norleucine
  MOD_RES (15)..(15): D-amino acid
  C-term NH2
LTFAAYWAQLAAALA

SEQ ID NO: 84 - protein, 15 aa, Artificial Sequence
  Description of Artificial Sequence: Synthetic peptide
  N-term Ac
  MOD_RES (4)..(4): Alpha-Me R8-octenyl-alanine olefin amino acid connected by an all-carbon crosslinker comprising one double bond
  misc_feature (4)..(11): Crosslink between residues
  MOD_RES (11)..(11): Alpha-Me S5-pentenyl-alanine olefin amino acid connected by an all-carbon crosslinker comprising one double bond
  MOD_RES (14)..(14): Norleucine
  MOD_RES (15)..(15): D-amino acid
  C-term NH2
LTFAAYWAQLAAALA

SEQ ID NO: 85 - protein, 15 aa, Artificial Sequence
  Description of Artificial Sequence: Synthetic peptide
  N-term Ac
  MOD_RES (4)..(4): Alpha-Me R8-octenyl-alanine olefin amino acid connected by an all-carbon crosslinker comprising one double bond
  misc_feature (4)..(11): Crosslink between residues
  MOD_RES (11)..(11): Alpha-Me S5-pentenyl-alanine olefin amino acid connected by an all-carbon crosslinker comprising one double bond
  MOD_RES (15)..(15): D-amino acid
  C-term NH2
LTFAAYWAALAAAIV

SEQ ID NO: 86 - protein, 15 aa, Artificial Sequence
  Description of Artificial Sequence: Synthetic peptide
  N-term Ac
  MOD_RES (4)..(4): Alpha-Me R8-octenyl-alanine olefin amino acid connected by an all-carbon crosslinker comprising one double bond
  misc_feature (4)..(11): Crosslink between residues
  MOD_RES (11)..(11): Alpha-Me S5-pentenyl-alanine olefin amino acid connected by an all-carbon crosslinker comprising one double bond
  MOD_RES (15)..(15): D-amino acid
  C-term NH2
LTFAAYWAALAAAIV

SEQ ID NO: 87 - protein, 15 aa, Artificial Sequence
  Description of Artificial Sequence: Synthetic peptide
  N-term Ac
  MOD_RES (4)..(4): Alpha-Me R8-octenyl-alanine olefin amino acid connected by an all-carbon crosslinker comprising one double bond
  misc_feature (4)..(11): Crosslink between residues
  MOD_RES (11)..(11): Alpha-Me S5-pentenyl-alanine olefin amino acid connected by an all-carbon crosslinker comprising one double bond
  MOD_RES (15)..(15): D-amino acid
  C-term NH2
LTFAAYWAQLAAAMV

SEQ ID NO: 88 - protein, 15 aa, Artificial Sequence
  Description of Artificial Sequence: Synthetic peptide
  N-term Ac
  MOD_RES (4)..(4): Alpha-Me R8-octenyl-alanine olefin amino acid connected by an all-carbon crosslinker comprising one double bond
  misc_feature (4)..(11): Crosslink between residues
  MOD_RES (11)..(11): Alpha-Me S5-pentenyl-alanine olefin amino acid connected by an all-carbon crosslinker comprising one double bond
  MOD_RES (14)..(14): Norleucine
  MOD_RES (15)..(15): D-amino acid
  C-term NH2
LTFAAYWAALAAALV

SEQ ID NO: 89 - protein, 15 aa, Artificial Sequence
  Description of Artificial Sequence: Synthetic peptide
  N-term Ac
  MOD_RES (4)..(4): Alpha-Me R8-octenyl-alanine olefin amino acid connected by an all-carbon crosslinker comprising one double bond
  misc_feature (4)..(11): Crosslink between residues
  MOD_RES (11)..(11): Alpha-Me S5-pentenyl-alanine olefin amino acid connected by an all-carbon crosslinker comprising one double bond
  MOD_RES (14)..(14): Norleucine
  MOD_RES (15)..(15): D-amino acid
  C-term NH2
LTFAAYWAALAAALV

SEQ ID NO: 90 - protein, 15 aa, Artificial Sequence
  Description of Artificial Sequence: Synthetic peptide
  N-term Ac
  MOD_RES (4)..(4): Alpha-Me R8-octenyl-alanine olefin amino acid connected by an all-carbon crosslinker comprising one double bond
  misc_feature (4)..(11): Crosslink between residues
  MOD_RES (11)..(11): Alpha-Me S5-pentenyl-alanine olefin amino acid connected by an all-carbon crosslinker comprising one double bond
  MOD_RES (15)..(15): D-amino acid
  C-term NH2
LTFAAYWAQLAAAIL

SEQ ID NO: 91 - protein, 15 aa, Artificial Sequence
  Description of Artificial Sequence: Synthetic peptide
  N-term Ac
  MOD_RES (4)..(4): Alpha-Me R8-octenyl-alanine olefin amino acid connected by an all-carbon crosslinker comprising one double bond
  misc_feature (4)..(11): Crosslink between residues
  MOD_RES (11)..(11): Alpha-Me S5-pentenyl-alanine olefin amino acid connected by an all-carbon crosslinker comprising one double bond
  MOD_RES (15)..(15): D-amino acid
  C-term NH2
LTFAAYWAQLAAAIL

SEQ ID NO: 92 - protein, 15 aa, Artificial Sequence
  Description of Artificial Sequence: Synthetic peptide
  N-term Ac
  MOD_RES (4)..(4): Alpha-Me R8-octenyl-alanine olefin amino acid connected by an all-carbon crosslinker comprising one double bond
  misc_feature (4)..(11): Crosslink between residues
  MOD_RES (11)..(11): Alpha-Me S5-pentenyl-alanine olefin amino acid connected by an all-carbon crosslinker comprising one double bond
  MOD_RES (15)..(15): D-amino acid
  C-term NH2
LTFAAYWAALAAAML

SEQ ID NO: 93 - protein, 15 aa, Artificial Sequence
  Description of Artificial Sequence: Synthetic peptide
  N-term Ac
  MOD_RES (4)..(4): Alpha-Me R8-octenyl-alanine olefin amino acid connected by an all-carbon crosslinker comprising one double bond
  misc_feature (4)..(11): Crosslink between residues
  MOD_RES (11)..(11): Alpha-Me S5-pentenyl-alanine olefin amino acid connected by an all-carbon crosslinker comprising one double bond
  MOD_RES (14)..(14): Norleucine
  MOD_RES (15)..(15): D-amino acid
  C-term NH2
LTFAAYWAQLAAALL

SEQ ID NO: 94 - protein, 15 aa, Artificial Sequence
  Description of Artificial Sequence: Synthetic peptide
  N-term Ac
  MOD_RES (4)..(4): Alpha-Me R8-octenyl-alanine olefin amino acid connected by an all-carbon crosslinker comprising one double bond
  misc_feature (4)..(11): Crosslink between residues
  MOD_RES (11)..(11): Alpha-Me S5-pentenyl-alanine olefin amino acid connected by an all-carbon crosslinker comprising one double bond
  MOD_RES (14)..(14): Norleucine
  MOD_RES (15)..(15): D-amino acid
  C-term NH2
LTFAAYWAQLAAALL

SEQ ID NO: 95 - protein, 13 aa, Artificial Sequence
  Description of Artificial Sequence: Synthetic peptide
  N-term Ac
  MOD_RES (2)..(2): Alpha-Me R8-octenyl-alanine olefin amino acid connected by an all-carbon crosslinker comprising one double bond
  misc_feature (2)..(9): Crosslink between residues
  MOD_RES (9)..(9): Alpha-Me S5-pentenyl-alanine olefin amino acid connected by an all-carbon crosslinker comprising one double bond
  C-term NH2
FAAYWEALAAAMA

SEQ ID NO: 96 - protein, 13 aa, Artificial Sequence
  Description of Artificial Sequence: Synthetic peptide
  N-term Ac
  MOD_RES (2)..(2): Alpha-Me R8-octenyl-alanine olefin amino acid connected by an all-carbon crosslinker comprising one double bond
  misc_feature (2)..(9): Crosslink between residues
  MOD_RES (9)..(9): Alpha-Me S5-pentenyl-alanine olefin amino acid connected by an all-carbon crosslinker comprising one double bond
  MOD_RES (12)..(12): Norleucine
  C-term NH2
FAAYWEALAAALA

SEQ ID NO: 97 - protein, 13 aa, Artificial Sequence
  Description of Artificial Sequence: Synthetic peptide
  N-term Ac
  MOD_RES (2)..(2): Alpha-Me R8-octenyl-alanine olefin amino acid connected by an all-carbon crosslinker comprising one double bond
  misc_feature (2)..(9): Crosslink between residues
  MOD_RES (9)..(9): Alpha-Me S5-pentenyl-alanine olefin amino acid connected by an all-carbon crosslinker comprising one double bond
  MOD_RES (13)..(13): D-amino acid
  C-term NH2
FAAYWEALAAAIA

SEQ ID NO: 98 - protein, 13 aa, Artificial Sequence
  Description of Artificial Sequence: Synthetic peptide
  N-term Ac
  MOD_RES (2)..(2): Alpha-Me R8-octenyl-alanine olefin amino acid connected by an all-carbon crosslinker comprising one double bond
  misc_feature (2)..(9): Crosslink between residues
  MOD_RES (9)..(9): Alpha-Me S5-pentenyl-alanine olefin amino acid connected by an all-carbon crosslinker comprising one double bond
  MOD_RES (13)..(13): D-amino acid
  C-term NH2
FAAYWEALAAAMA

SEQ ID NO: 99 - protein, 13 aa, Artificial Sequence
  Description of Artificial Sequence: Synthetic peptide
  N-term Ac
  MOD_RES (2)..(2): Alpha-Me R8-octenyl-alanine olefin amino acid connected by an all-carbon crosslinker comprising one double bond
  misc_feature (2)..(9): Crosslink between residues
  MOD_RES (9)..(9): Alpha-Me S5-pentenyl-alanine olefin amino acid connected by an all-carbon crosslinker comprising one double bond
  MOD_RES (12)..(12): Norleucine
  MOD_RES (13)..(13): D-amino acid
  C-term NH2
FAAYWEALAAALA

SEQ ID NO: 100 - protein, 13 aa, Artificial Sequence
  Description of Artificial Sequence: Synthetic peptide
  N-term Ac
  MOD_RES (2)..(2): Alpha-Me R8-octenyl-alanine olefin amino acid connected by an all-carbon crosslinker comprising one double bond
  misc_feature (2)..(9): Crosslink between residues
  MOD_RES (9)..(9): Alpha-Me S5-pentenyl-alanine olefin amino acid connected by an all-carbon crosslinker comprising one double bond
  MOD_RES (13)..(13): D-amino acid
  C-term NH2
FAAYWEALAAAIV

SEQ ID NO: 101 - protein, 13 aa, Artificial Sequence
  Description of Artificial Sequence: Synthetic peptide
  N-term Ac
  MOD_RES (2)..(2): Alpha-Me R8-octenyl-alanine olefin amino acid connected by an all-carbon crosslinker comprising one double bond
  misc_feature (2)..(9): Crosslink between residues
  MOD_RES (9)..(9): Alpha-Me S5-pentenyl-alanine olefin amino acid connected by an all-carbon crosslinker comprising one double bond
  MOD_RES (13)..(13): D-amino acid
  C-term NH2
FAAYWEALAAAMV

SEQ ID NO: 102 - protein, 13 aa, Artificial Sequence
  Description of Artificial Sequence: Synthetic peptide
  N-term Ac
  MOD_RES (2)..(2): Alpha-Me R8-octenyl-alanine olefin amino acid connected by an all-carbon crosslinker comprising one double bond
  misc_feature (2)..(9): Crosslink between residues
  MOD_RES (9)..(9): Alpha-Me S5-pentenyl-alanine olefin amino acid connected by an all-carbon crosslinker comprising one double bond
  MOD_RES (12)..(12): Norleucine
  MOD_RES (13)..(13): D-amino acid
  C-term NH2
FAAYWEALAAALV

SEQ ID NO: 103 - protein, 13 aa, Artificial Sequence
  Description of Artificial Sequence: Synthetic peptide
  N-term Ac
  MOD_RES (2)..(2): Alpha-Me R8-octenyl-alanine olefin amino acid connected by an all-carbon crosslinker comprising one double bond
  misc_feature (2)..(9): Crosslink between residues
  MOD_RES (9)..(9): Alpha-Me S5-pentenyl-alanine olefin amino acid connected by an all-carbon crosslinker comprising one double bond
  MOD_RES (13)..(13): D-amino acid
  C-term NH2
FAAYWEALAAAIL

SEQ ID NO: 104 - protein, 13 aa, Artificial Sequence
  Description of Artificial Sequence: Synthetic peptide
  N-term Ac
  MOD_RES (2)..(2): Alpha-Me R8-octenyl-alanine olefin amino acid connected by an all-carbon crosslinker comprising one double bond
  misc_feature (2)..(9): Crosslink between residues
  MOD_RES (9)..(9): Alpha-Me S5-pentenyl-alanine olefin amino acid connected by an all-carbon crosslinker comprising one double bond
  MOD_RES (13)..(13): D-amino acid
  C-term NH2
FAAYWEALAAAML

SEQ ID NO: 105 - protein, 13 aa, Artificial Sequence
  Description of Artificial Sequence: Synthetic peptide
  N-term Ac
  MOD_RES (2)..(2): Alpha-Me R8-octenyl-alanine olefin amino acid connected by an all-carbon crosslinker comprising one double bond
  misc_feature (2)..(9): Crosslink between residues
  MOD_RES (9)..(9): Alpha-Me S5-pentenyl-alanine olefin amino acid connected by an all-carbon crosslinker comprising one double bond
  MOD_RES (12)..(12): Norleucine
  MOD_RES (13)..(13): D-amino acid
  C-term NH2
FAAYWEALAAALL

SEQ ID NO: 106 - protein, 13 aa, Artificial Sequence
  Description of Artificial Sequence: Synthetic peptide
  N-term Ac
  MOD_RES (2)..(2): Alpha-Me R8-octenyl-alanine olefin amino acid connected by an all-carbon crosslinker comprising one double bond
  misc_feature (2)..(9): Crosslink between residues
  MOD_RES (9)..(9): Alpha-Me S5-pentenyl-alanine olefin amino acid connected by an all-carbon crosslinker comprising one double bond
  MOD_RES (12)..(12): Norleucine
  MOD_RES (13)..(13): D-amino acid
  C-term NH2
FAAYWEALAAALL

SEQ ID NO: 107 - protein, 14 aa, Artificial Sequence
  Description of Artificial Sequence: Synthetic peptide
  N-term Ac
  MOD_RES (4)..(4): Alpha-Me R8-octenyl-alanine olefin amino acid connected by an all-carbon crosslinker comprising one double bond
  misc_feature (4)..(11): Crosslink between residues
  MOD_RES (7)..(7): 6cl-Trp
  MOD_RES (11)..(11): Alpha-Me S5-pentenyl-alanine olefin amino acid connected by an all-carbon crosslinker comprising one double bond
  C-term NH2
LTFAAYWAQLASAA

SEQ ID NO: 108 - protein, 14 aa, Artificial Sequence
  Description of Artificial Sequence: Synthetic peptide
  N-term Ac
  MOD_RES (4)..(4): Alpha-Me R8-octenyl-alanine olefin amino acid connected by an all-carbon crosslinker comprising one double bond
  misc_feature (4)..(11): Crosslink between residues
  MOD_RES (7)..(7): 6cl-Trp
  MOD_RES (11)..(11): Alpha-Me S5-pentenyl-alanine olefin amino acid connected by an all-carbon crosslinker comprising one double bond
  C-term NH2
LTFAAYWAQLASAA

SEQ ID NO: 109 - protein, 15 aa, Artificial Sequence
  Description of Artificial Sequence: Synthetic peptide
  N-term Ac
  MOD_RES (4)..(4): Alpha-Me R8-octenyl-alanine olefin amino acid connected by an all-carbon crosslinker comprising one double bond
  misc_feature (4)..(11): Crosslink between residues
  MOD_RES (11)..(11): Alpha-Me S5-pentenyl-alanine olefin amino acid connected by an all-carbon crosslinker comprising one double bond
  MOD_RES (15)..(15): D-amino acid
  C-term NH2
WTFAFYWSQLAAVAA

SEQ ID NO: 110 - protein, 15 aa, Artificial Sequence
  Description of Artificial Sequence: Synthetic peptide
  N-term Ac
  MOD_RES (4)..(4): Alpha-Me R8-octenyl-alanine olefin amino acid connected by an all-carbon crosslinker comprising one double bond
  misc_feature (4)..(11): Crosslink between residues
  MOD_RES (11)..(11): Alpha-Me S5-pentenyl-alanine olefin amino acid connected by an all-carbon crosslinker comprising one double bond
  MOD_RES (15)..(15): D-amino acid
  C-term NH2
WTFAFYWSQLAAVAA

SEQ ID NO: 111 - protein, 14 aa, Artificial Sequence
  Description of Artificial Sequence: Synthetic peptide
  N-term Ac
  MOD_RES (4)..(4): Alpha-Me R8-octenyl-alanine olefin amino acid connected by an all-carbon crosslinker comprising one double bond
  misc_feature (4)..(11): Crosslink between residues
  MOD_RES (11)..(11): Alpha-Me S5-pentenyl-alanine olefin amino acid connected by an all-carbon crosslinker comprising one double bond
  C-term NH2
WTFAVYWSQLAAVA

SEQ ID NO: 112 - protein, 14 aa, Artificial Sequence
  Description of Artificial Sequence: Synthetic peptide
  N-term Ac
  MOD_RES (4)..(4): Alpha-Me R8-octenyl-alanine olefin amino acid connected by an all-carbon crosslinker comprising one double bond
  misc_feature (4)..(11): Crosslink between residues
  MOD_RES (11)..(11): Alpha-Me S5-pentenyl-alanine olefin amino acid connected by an all-carbon crosslinker comprising one double bond
  C-term NH2
WTFAVYWSQLAAVA

SEQ ID NO: 113 - protein, 15 aa, Artificial Sequence
  Description of Artificial Sequence: Synthetic peptide
  N-term Ac
  MOD_RES (4)..(4): Alpha-Me R8-octenyl-alanine olefin amino acid connected by an all-carbon crosslinker comprising one double bond
  misc_feature (4)..(11): Crosslink between residues
  MOD_RES (11)..(11): Alpha-Me S5-pentenyl-alanine olefin amino acid connected by an all-carbon crosslinker comprising one double bond
  MOD_RES (15)..(15): D-amino acid
  C-term NH2
WTFAFYWSQLASAAA

SEQ ID NO: 114 - protein, 15 aa, Artificial Sequence
  Description of Artificial Sequence: Synthetic peptide
  N-term Ac
  MOD_RES (4)..(4): Alpha-Me R8-octenyl-alanine olefin amino acid connected by an all-carbon crosslinker comprising one double bond
  misc_feature (4)..(11): Crosslink between residues
  MOD_RES (11)..(11): Alpha-Me S5-pentenyl-alanine olefin amino acid connected by an all-carbon crosslinker comprising one double bond
  MOD_RES (15)..(15): D-amino acid
  C-term NH2
WTFAFYWSQLASAAA

SEQ ID NO: 115 - protein, 16 aa, Artificial Sequence
  Description of Artificial Sequence: Synthetic peptide
  N-term Ac
  MOD_RES (4)..(4): Alpha-Me R8-octenyl-alanine olefin amino acid connected by an all-carbon crosslinker comprising one double bond
  misc_feature (4)..(11): Crosslink between residues
  MOD_RES (11)..(11): Alpha-Me S5-pentenyl-alanine olefin amino acid connected by an all-carbon crosslinker comprising one double bond
  MOD_RES (15)..(16): D-amino acid
  C-term NH2
WTFAVYWSQLAAVAAA

SEQ ID NO: 116 - protein, 16 aa, Artificial Sequence
  Description of Artificial Sequence: Synthetic peptide
  N-term Ac
  MOD_RES (4)..(4): Alpha-Me R8-octenyl-alanine olefin amino acid connected by an all-carbon crosslinker comprising one double bond
  misc_feature (4)..(11): Crosslink between residues
  MOD_RES (11)..(11): Alpha-Me S5-pentenyl-alanine olefin amino acid connected by an all-carbon crosslinker comprising one double bond
  MOD_RES (15)..(16): D-amino acid
  C-term NH2
WTFAVYWSQLAAVAAA

SEQ ID NO: 117 - protein, 14 aa, Artificial Sequence
  Description of Artificial Sequence: Synthetic peptide
  N-term Ac
  MOD_RES (4)..(4): Alpha-Me R8-octenyl-alanine olefin amino acid connected by an all-carbon crosslinker comprising one double bond
  misc_feature (4)..(11): Crosslink between residues
  MOD_RES (11)..(11): Alpha-Me S5-pentenyl-alanine olefin amino acid connected by an all-carbon crosslinker comprising one double bond
  C-term NH2
LTFAAYWAQLAAVG

SEQ ID NO: 118 - protein, 14 aa, Artificial Sequence
  Description of Artificial Sequence: Synthetic peptide
  N-term Ac
  MOD_RES (4)..(4): Alpha-Me R8-octenyl-alanine olefin amino acid connected by an all-carbon crosslinker comprising one double bond
  misc_feature (4)..(11): Crosslink between residues
  MOD_RES (11)..(11): Alpha-Me S5-pentenyl-alanine olefin amino acid connected by an all-carbon crosslinker comprising one double bond
  C-term NH2
LTFAAYWAQLAAVG

SEQ ID NO: 119 - protein, 14 aa, Artificial Sequence
  Description of Artificial Sequence: Synthetic peptide
  N-term Ac
  MOD_RES (4)..(4): Alpha-Me R8-octenyl-alanine olefin amino acid connected by an all-carbon crosslinker comprising one double bond
  misc_feature (4)..(11): Crosslink between residues
  MOD_RES (11)..(11): Alpha-Me S5-pentenyl-alanine olefin amino acid connected by an all-carbon crosslinker comprising one double bond
  C-term NH2
LTFAAYWAQLAAVQ

SEQ ID NO: 120 - protein, 14 aa, Artificial Sequence
  Description of Artificial Sequence: Synthetic peptide
  N-term Ac
  MOD_RES (4)..(4): Alpha-Me R8-octenyl-alanine olefin amino acid connected by an all-carbon crosslinker comprising one double bond
  misc_feature (4)..(11): Crosslink between residues
  MOD_RES (11)..(11): Alpha-Me S5-pentenyl-alanine olefin amino acid connected by an all-carbon crosslinker comprising one double bond
  C-term NH2
LTFAAYWAQLAAVQ

SEQ ID NO: 121 - protein, 14 aa, Artificial Sequence
  Description of Artificial Sequence: Synthetic peptide
  N-term Ac
  MOD_RES (4)..(4): Alpha-Me R8-octenyl-alanine olefin amino acid connected by an all-carbon crosslinker comprising one double bond
  misc_feature (4)..(11): Crosslink between residues
  MOD_RES (11)..(11): Alpha-Me S5-pentenyl-alanine olefin amino acid connected by an all-carbon crosslinker comprising one double bond
  MOD_RES (14)..(14): D-amino acid
  C-term NH2
LTFAAYWAQLASAA

SEQ ID NO: 122 - protein, 14 aa, Artificial Sequence
  Description of Artificial Sequence: Synthetic peptide
  N-term Ac
  MOD_RES (4)..(4): Alpha-Me R8-octenyl-alanine olefin amino acid connected by an all-carbon crosslinker comprising one double bond
  misc_feature (4)..(11): Crosslink between residues
  MOD_RES (11)..(11): Alpha-Me S5-pentenyl-alanine olefin amino acid connected by an all-carbon crosslinker comprising one double bond
  MOD_RES (14)..(14): D-amino acid
  C-term NH2
LTFAAYWAQLASAA

SEQ ID NO: 123 - protein, 14 aa, Artificial Sequence
  Description of Artificial Sequence: Synthetic peptide
  N-term Ac
  MOD_RES (4)..(4): Alpha-Me R8-octenyl-alanine olefin amino acid connected by an all-carbon crosslinker comprising one double bond
  misc_feature (4)..(11): Crosslink between residues
  MOD_RES (10)..(10): hLeu
  MOD_RES (11)..(11): Alpha-Me S5-pentenyl-alanine olefin amino acid connected by an all-carbon crosslinker comprising one double bond
  C-term NH2
LTFAAYWAQLASAA

SEQ ID NO: 124 - protein, 14 aa, Artificial Sequence
  Description of Artificial Sequence: Synthetic peptide
  N-term Ac
  MOD_RES (4)..(4): Alpha-Me R8-octenyl-alanine olefin amino acid connected by an all-carbon crosslinker comprising one double bond
  misc_feature (4)..(11): Crosslink between residues
  MOD_RES (10)..(10): hLeu
  MOD_RES (11)..(11): Alpha-Me S5-pentenyl-alanine olefin amino acid connected by an all-carbon crosslinker comprising one double bond
  C-term NH2
LTFAAYWAQLASAA

SEQ ID NO: 125 - protein, 14 aa, Artificial Sequence
  Description of Artificial Sequence: Synthetic peptide
  N-term Ac
  MOD_RES (4)..(4): Alpha-Me R8-octenyl-alanine olefin amino acid connected by an all-carbon crosslinker comprising one double bond
  misc_feature (4)..(14): Crosslink between residues
  MOD_RES (11)..(11): Two pentenyl-alanine olefin side chains, each of which is crosslinked to another amino acid as indicated
  MOD_RES (14)..(14): Alpha-Me S5-pentenyl-alanine olefin amino acid connected by an all-carbon crosslinker comprising one double bond
  C-term NH2
LTFAAYWEQLASAA

SEQ ID NO: 126 - protein, 14 aa, Artificial Sequence
  Description of Artificial Sequence: Synthetic peptide
  N-term Ac
  MOD_RES (4)..(4): Alpha-Me R8-octenyl-alanine olefin amino acid connected by an all-carbon crosslinker comprising one double bond
  misc_feature (4)..(11): Crosslink between residues
  MOD_RES (11)..(11): Alpha-Me S5-pentenyl-alanine olefin amino acid connected by an all-carbon crosslinker comprising one double bond
  C-term NH2
LTFAAYWAQLASLA

SEQ ID NO: 127 - protein, 14 aa, Artificial Sequence
  Description of Artificial Sequence: Synthetic peptide
  N-term Ac
  MOD_RES (4)..(4): Alpha-Me R8-octenyl-alanine olefin amino acid connected by an all-carbon crosslinker comprising one double bond
  misc_feature (4)..(11): Crosslink between residues
  MOD_RES (11)..(11): Alpha-Me S5-pentenyl-alanine olefin amino acid connected by an all-carbon crosslinker comprising one double bond
  C-term NH2
LTFAAYWAQLASLA

SEQ ID NO: 128 - protein, 14 aa, Artificial Sequence
  Description of Artificial Sequence: Synthetic peptide
  N-term Ac
  MOD_RES (4)..(4): Alpha-Me R8-octenyl-alanine olefin amino acid connected by an all-carbon crosslinker comprising one double bond
  misc_feature (4)..(11): Crosslink between residues
  MOD_RES (11)..(11): Alpha-Me S5-pentenyl-alanine olefin amino acid connected by an all-carbon crosslinker comprising one double bond
  C-term NH2
LTFAAYWAQLASWA

SEQ ID NO: 129 - protein, 14 aa, Artificial Sequence
  Description of Artificial Sequence: Synthetic peptide
  N-term Ac
  MOD_RES (4)..(4): Alpha-Me R8-octenyl-alanine olefin amino acid connected by an all-carbon crosslinker comprising one double bond
  misc_feature (4)..(11): Crosslink between residues
  MOD_RES (11)..(11): Alpha-Me S5-pentenyl-alanine olefin amino acid connected by an all-carbon crosslinker comprising one double bond
  C-term NH2
LTFAAYWAQLASWA

SEQ ID NO: 130 - protein, 14 aa, Artificial Sequence
  Description of Artificial Sequence: Synthetic peptide
  N-term Ac
  MOD_RES (4)..(4): Alpha-Me R8-octenyl-alanine olefin amino acid connected by an all-carbon crosslinker comprising one double bond
  misc_feature (4)..(11): Crosslink between residues
  MOD_RES (11)..(11): Alpha-Me S5-pentenyl-alanine olefin amino acid connected by an all-carbon crosslinker comprising one double bond
  C-term NH2
LTFAAYWAQLASVS

SEQ ID NO: 131 - protein, 14 aa, Artificial Sequence
  Description of Artificial Sequence: Synthetic peptide
  N-term Ac
  MOD_RES (4)..(4): Alpha-Me R8-octenyl-alanine olefin amino acid connected by an all-carbon crosslinker comprising one double bond
  misc_feature (4)..(11): Crosslink between residues
  MOD_RES (11)..(11): Alpha-Me S5-pentenyl-alanine olefin amino acid connected by an all-carbon crosslinker comprising one double bond
  C-term NH2
LTFAAYWAQLASAS

SEQ ID NO: 132 - protein, 14 aa, Artificial Sequence
  Description of Artificial Sequence: Synthetic peptide
  N-term Ac
  MOD_RES (4)..(4): Alpha-Me R8-octenyl-alanine olefin amino acid connected by an all-carbon crosslinker comprising one double bond
  misc_feature (4)..(11): Crosslink between residues
  MOD_RES (11)..(11): Alpha-Me S5-pentenyl-alanine olefin amino acid connected by an all-carbon crosslinker comprising one double bond
  C-term NH2
LTFAAYWAQLASVG

SEQ ID NO: 133 - protein, 14 aa, Artificial Sequence
  Description of Artificial Sequence: Synthetic peptide
  N-term Ac
  MOD_RES (4)..(4): Alpha-Me R8-octenyl-alanine olefin amino acid connected by an all-carbon crosslinker comprising one double bond
  misc_feature (4)..(11): Crosslink between residues
  MOD_RES (11)..(11): Alpha-Me S5-pentenyl-alanine olefin amino acid connected by an all-carbon crosslinker comprising one double bond
  MOD_RES (14)..(14): D-amino acid
  C-term NH2
ETFAVYWAQLASAA

SEQ ID NO: 134 - protein, 14 aa, Artificial Sequence
  Description of Artificial Sequence: Synthetic peptide
  N-term Ac
  MOD_RES (4)..(4): Alpha-Me R8-octenyl-alanine olefin amino acid connected by an all-carbon crosslinker comprising one double bond
  misc_feature (4)..(11): Crosslink between residues
  MOD_RES (11)..(11): Alpha-Me S5-pentenyl-alanine olefin amino acid connected by an all-carbon crosslinker comprising one double bond
  C-term NH2
ETFAVYWAQLASAA

SEQ ID NO: 135 - protein, 14 aa, Artificial Sequence
  Description of Artificial Sequence: Synthetic peptide
  N-term Ac
  MOD_RES (4)..(4): Alpha-Me R8-octenyl-alanine olefin amino acid connected by an all-carbon crosslinker comprising one double bond
  misc_feature (4)..(11): Crosslink between residues
  MOD_RES (11)..(11): Alpha-Me S5-pentenyl-alanine olefin amino acid connected by an all-carbon crosslinker comprising one double bond
  C-term NH2
ETFAVYWAQLASVA

SEQ ID NO: 136 - protein, 14 aa, Artificial Sequence
  Description of Artificial Sequence: Synthetic peptide
  N-term Ac
  MOD_RES (4)..(4): Alpha-Me R8-octenyl-alanine olefin amino acid connected by an all-carbon crosslinker comprising one double bond
  misc_feature (4)..(11): Crosslink between residues
  MOD_RES (11)..(11): Alpha-Me S5-pentenyl-alanine olefin amino acid connected by an all-carbon crosslinker comprising one double bond
  C-term NH2
ETFAVYWAQLASLA

SEQ ID NO: 137 - protein, 14 aa, Artificial Sequence
  Description of Artificial Sequence: Synthetic peptide
  N-term Ac
  MOD_RES (4)..(4): Alpha-Me R8-octenyl-alanine olefin amino acid connected by an all-carbon crosslinker comprising one double bond
  misc_feature (4)..(11): Crosslink between residues
  MOD_RES (11)..(11): Alpha-Me S5-pentenyl-alanine olefin amino acid connected by an all-carbon crosslinker comprising one double bond
  C-term NH2
ETFAVYWAQLASWA

SEQ ID NO: 138 - protein, 14 aa, Artificial Sequence
  Description of Artificial Sequence: Synthetic peptide
  N-term Ac
  MOD_RES (4)..(4): Alpha-Me R8-octenyl-alanine olefin amino acid connected by an all-carbon crosslinker comprising one double bond
  misc_feature (4)..(11): Crosslink between residues
  MOD_RES (11)..(11): Alpha-Me S5-pentenyl-alanine olefin amino acid connected by an all-carbon crosslinker comprising one double bond
  C-term NH2
ETFAKYWAQLASWA

SEQ ID NO: 139 - protein, 14 aa, Artificial Sequence
  Description of Artificial Sequence: Synthetic peptide
  N-term Ac
  MOD_RES (4)..(4): Alpha-Me R8-octenyl-alanine olefin amino acid connected by an all-carbon crosslinker comprising one double bond
  misc_feature (4)..(11): Crosslink between residues
  MOD_RES (11)..(11): Alpha-Me S5-pentenyl-alanine olefin amino acid connected by an all-carbon crosslinker comprising one double bond
  C-term NH2
ETFAVYWAQLASVS

SEQ ID NO: 140 - protein, 14 aa, Artificial Sequence
  Description of Artificial Sequence: Synthetic peptide
  N-term Ac
  MOD_RES (4)..(4): Alpha-Me R8-octenyl-alanine olefin amino acid connected by an all-carbon crosslinker comprising one double bond
  misc_feature (4)..(11): Crosslink between residues
  MOD_RES (11)..(11): Alpha-Me S5-pentenyl-alanine olefin amino acid connected by an all-carbon crosslinker comprising one double bond
  C-term NH2
ETFAVYWAQLASAS

SEQ ID NO: 141 - protein, 14 aa, Artificial Sequence
  Description of Artificial Sequence: Synthetic peptide
  N-term Ac
  MOD_RES (4)..(4): Alpha-Me R8-octenyl-alanine olefin amino acid connected by an all-carbon crosslinker comprising one double bond
  misc_feature (4)..(11): Crosslink between residues
  MOD_RES (11)..(11): Alpha-Me S5-pentenyl-alanine olefin amino acid connected by an all-carbon crosslinker comprising one double bond
  C-term NH2
ETFAVYWAQLASVG

SEQ ID NO: 142 - protein, 14 aa, Artificial Sequence
  Description of Artificial Sequence: Synthetic peptide
  N-term Ac
  MOD_RES (4)..(4): Alpha-Me R8-octenyl-alanine olefin amino acid connected by an all-carbon crosslinker comprising one double bond
  misc_feature (4)..(11): Crosslink between residues
  MOD_RES (11)..(11): Alpha-Me S5-pentenyl-alanine olefin amino acid connected by an all-carbon crosslinker comprising one double bond
  MOD_RES (14)..(14): D-amino acid
  C-term NH2
LTFAVYWAQLASSA

SEQ ID NO: 143 - protein, 14 aa, Artificial Sequence
  Description of Artificial Sequence: Synthetic peptide
  N-term Ac
  MOD_RES (4)..(4): Alpha-Me R8-octenyl-alanine olefin amino acid connected by an all-carbon crosslinker comprising one double bond
  misc_feature (4)..(11): Crosslink between residues
  MOD_RES (11)..(11): Alpha-Me S5-pentenyl-alanine olefin amino acid connected by an all-carbon crosslinker comprising one double bond
  MOD_RES (14)..(14): D-amino acid
  C-term NH2
ETFAVYWAQLASSA

SEQ ID NO: 144 - protein, 14 aa, Artificial Sequence
  Description of Artificial Sequence: Synthetic peptide
  N-term Ac
  MOD_RES (4)..(4): Alpha-Me R8-octenyl-alanine olefin amino acid connected by an all-carbon crosslinker comprising one double bond
  misc_feature (4)..(11): Crosslink between residues
  MOD_RES (11)..(11): Alpha-Me S5-pentenyl-alanine olefin amino acid connected by an all-carbon crosslinker comprising one double bond
  MOD_RES (14)..(14): D-amino acid
  C-term NH2
LTFAVYWAQLASNA

SEQ ID NO: 145 - protein, 14 aa, Artificial Sequence
  Description of Artificial Sequence: Synthetic peptide
  N-term Ac
  MOD_RES (4)..(4): Alpha-Me R8-octenyl-alanine olefin amino acid connected by an all-carbon crosslinker comprising one double bond
  misc_feature (4)..(11): Crosslink between residues
  MOD_RES (11)..(11): Alpha-Me S5-pentenyl-alanine olefin amino acid connected by an all-carbon crosslinker comprising one double bond
  MOD_RES (14)..(14): D-amino acid
  C-term NH2
ETFAVYWAQLASNA

SEQ ID NO: 146 - protein, 14 aa, Artificial Sequence
  Description of Artificial Sequence: Synthetic peptide
  N-term Ac
  MOD_RES (4)..(4): Alpha-Me R8-octenyl-alanine olefin amino acid connected by an all-carbon crosslinker comprising one double bond
  misc_feature (4)..(11): Crosslink between residues
  MOD_RES (11)..(11): Alpha-Me S5-pentenyl-alanine olefin amino acid connected by an all-carbon crosslinker comprising one double bond
  MOD_RES (14)..(14): D-amino acid
  C-term NH2
LTFAVYWAQLASAA

SEQ ID NO: 147 - protein, 14 aa, Artificial Sequence
  Description of Artificial Sequence: Synthetic peptide
  N-term Ac
  MOD_RES (4)..(4): Alpha-Me R8-octenyl-alanine olefin amino acid connected by an all-carbon crosslinker comprising one double bond
  misc_feature (4)..(11): Crosslink between residues
  MOD_RES (11)..(11): Alpha-Me S5-pentenyl-alanine olefin amino acid connected by an all-carbon crosslinker comprising one double bond
  C-term NH2
LTFAVYWAQLASVA

SEQ ID NO: 148 - protein, 14 aa, Artificial Sequence
  Description of Artificial Sequence: Synthetic peptide
  N-term Ac
  MOD_RES (4)..(4): Alpha-Me R8-octenyl-alanine olefin amino acid connected by an all-carbon crosslinker comprising one double bond
  misc_feature (4)..(11): Crosslink between residues
  MOD_RES (11)..(11): Alpha-Me S5-pentenyl-alanine olefin amino acid connected by an all-carbon crosslinker comprising one double bond
  C-term NH2
LTFAVYWAQLASVA

SEQ ID NO: 149 - protein, 14 aa, Artificial Sequence
  Description of Artificial Sequence: Synthetic peptide
  N-term Ac
  MOD_RES (4)..(4): Alpha-Me R8-octenyl-alanine olefin amino acid connected by an all-carbon crosslinker comprising one double bond
  misc_feature (4)..(11): Crosslink between residues
  MOD_RES (11)..(11): Alpha-Me S5-pentenyl-alanine olefin amino acid connected by an all-carbon crosslinker comprising one double bond
  C-term NH2
LTFAVYWAQLASWA

SEQ ID NO: 150 - protein, 14 aa, Artificial Sequence
  Description of Artificial Sequence: Synthetic peptide
  N-term Ac
  MOD_RES (4)..(4): Alpha-Me R8-octenyl-alanine olefin amino acid connected by an all-carbon crosslinker comprising one double bond
  misc_feature (4)..(11): Crosslink between residues
  MOD_RES (11)..(11): Alpha-Me S5-pentenyl-alanine olefin amino acid connected by an all-carbon crosslinker comprising one double bond
  C-term NH2
LTFAVYWAQLASVS

SEQ ID NO: 151 - protein, 14 aa, Artificial Sequence
  Description of Artificial Sequence: Synthetic peptide
  N-term Ac
  MOD_RES (4)..(4): Alpha-Me R8-octenyl-alanine olefin amino acid connected by an all-carbon crosslinker comprising one double bond
  misc_feature (4)..(11): Crosslink between residues
  MOD_RES (11)..(11): Alpha-Me S5-pentenyl-alanine olefin amino acid connected by an all-carbon crosslinker comprising one double bond
  C-term NH2
LTFAVYWAQLASVS

SEQ ID NO: 152 - protein, 14 aa, Artificial Sequence
  Description of Artificial Sequence: Synthetic peptide
  N-term Ac
  MOD_RES (4)..(4): Alpha-Me R8-octenyl-alanine olefin amino acid connected by an all-carbon crosslinker comprising one double bond
  misc_feature (4)..(11): Crosslink between residues
  MOD_RES (11)..(11): Alpha-Me S5-pentenyl-alanine olefin amino acid connected by an all-carbon crosslinker comprising one double bond
  C-term NH2
LTFAVYWAQLASAS

SEQ ID NO: 153 - protein, 14 aa, Artificial Sequence
  Description of Artificial Sequence: Synthetic peptide
  N-term Ac
  MOD_RES (4)..(4): Alpha-Me R8-octenyl-alanine olefin amino acid connected by an all-carbon crosslinker comprising one double bond
  misc_feature (4)..(11): Crosslink between residues
  MOD_RES (11)..(11): Alpha-Me S5-pentenyl-alanine olefin amino acid connected by an all-carbon crosslinker comprising one double bond
  C-term NH2
LTFAVYWAQLASAS

SEQ ID NO: 154 - protein, 14 aa, Artificial Sequence
  Description of Artificial Sequence: Synthetic peptide
  N-term Ac
  MOD_RES (4)..(4): Alpha-Me R8-octenyl-alanine olefin amino acid connected by an all-carbon crosslinker comprising one double bond
  misc_feature (4)..(11): Crosslink between residues
  MOD_RES (11)..(11): Alpha-Me S5-pentenyl-alanine olefin amino acid connected by an all-carbon crosslinker comprising one double bond
  C-term NH2
LTFAVYWAQLASVG

SEQ ID NO: 155 - protein, 14 aa, Artificial Sequence
  Description of Artificial Sequence: Synthetic peptide
  N-term Ac
  MOD_RES (4)..(4): Alpha-Me R8-octenyl-alanine olefin amino acid connected by an all-carbon crosslinker comprising one double bond
  misc_feature (4)..(11): Crosslink between residues
  MOD_RES (11)..(11): Alpha-Me S5-pentenyl-alanine olefin amino acid connected by an all-carbon crosslinker comprising one double bond
  C-term NH2
LTFAVYWAQLASVG

SEQ ID NO: 156 - protein, 14 aa, Artificial Sequence
  Description of Artificial Sequence: Synthetic peptide
  N-term Ac
  MOD_RES (4)..(4): Alpha-Me R8-octenyl-alanine olefin amino acid connected by an all-carbon crosslinker comprising one double bond
  misc_feature (4)..(11): Crosslink between residues
  MOD_RES (10)..(10): Cyclohexyl-Ala
  MOD_RES (11)..(11): Alpha-Me S5-pentenyl-alanine olefin amino acid connected by an all-carbon crosslinker comprising one double bond
  C-term NH2
LTFAEYWAQAASAA

SEQ ID NO: 157 - protein, 14 aa, Artificial Sequence
  Description of Artificial Sequence: Synthetic peptide
  N-term Ac
  MOD_RES (4)..(4): Alpha-Me R8-octenyl-alanine olefin amino acid connected by an all-carbon crosslinker comprising one double bond
  misc_feature (4)..(11): Crosslink between residues
  MOD_RES (10)..(10): Cyclohexyl-Ala
  MOD_RES (11)..(11): Alpha-Me S5-pentenyl-alanine olefin amino acid connected by an all-carbon crosslinker comprising one double bond
  C-term NH2
LTFAEYWAQAASAA

SEQ ID NO: 158 - protein, 14 aa, Artificial Sequence
  Description of Artificial Sequence: Synthetic peptide
  N-term Ac
  MOD_RES (4)..(4): Alpha-Me R8-octenyl-alanine olefin amino acid connected by an all-carbon crosslinker comprising one double bond
  misc_feature (4)..(11): Crosslink between residues
  MOD_RES (10)..(10): Cyclopentyl-Gly
  MOD_RES (11)..(11): Alpha-Me S5-pentenyl-alanine olefin amino acid connected by an all-carbon crosslinker comprising one double bond
  C-term NH2
LTFAEYWAQGASAA

SEQ ID NO: 159 - protein, 14 aa, Artificial Sequence
  Description of Artificial Sequence: Synthetic peptide
  N-term Ac
  MOD_RES (4)..(4): Alpha-Me R8-octenyl-alanine olefin amino acid connected by an all-carbon crosslinker comprising one double bond
  misc_feature (4)..(11): Crosslink between residues
  MOD_RES (10)..(10): Cyclopentyl-Gly
  MOD_RES (11)..(11): Alpha-Me S5-pentenyl-alanine olefin amino acid connected by an all-carbon crosslinker comprising one double bond
  C-term NH2
LTFAEYWAQGASAA

SEQ ID NO: 160 - protein, 14 aa, Artificial Sequence
  Description of Artificial Sequence: Synthetic peptide
  N-term Ac
  MOD_RES (4)..(4): Alpha-Me R8-octenyl-alanine olefin amino acid connected by an all-carbon crosslinker comprising one double bond
  misc_feature (4)..(11): Crosslink between residues
  MOD_RES (11)..(11): Alpha-Me S5-pentenyl-alanine olefin amino acid connected by an all-carbon crosslinker comprising one double bond
  C-term NH2
LTFAEYWAQFASAA

SEQ ID NO: 161 - protein, 14 aa, Artificial Sequence
  Description of Artificial Sequence: Synthetic peptide
  N-term Ac
  MOD_RES (4)..(4): Alpha-Me R8-octenyl-alanine olefin amino acid connected by an all-carbon crosslinker comprising one double bond
  misc_feature (4)..(11): Crosslink between residues
  MOD_RES (11)..(11): Alpha-Me S5-pentenyl-alanine olefin amino acid connected by an all-carbon crosslinker comprising one double bond
  C-term NH2
LTFAEYWAQFASAA

SEQ ID NO: 162 - protein, 14 aa, Artificial Sequence
  Description of Artificial Sequence: Synthetic peptide
  N-term Ac
  MOD_RES (4)..(4): Alpha-Me R8-octenyl-alanine olefin amino acid connected by an all-carbon crosslinker comprising one double bond
  misc_feature (4)..(11): Crosslink between residues
  MOD_RES (10)..(10): Cyclobutyl-Ala
  MOD_RES (11)..(11): Alpha-Me S5-pentenyl-alanine olefin amino acid connected by an all-carbon crosslinker comprising one double bond
  C-term NH2
LTFAEYWAQAASAA

SEQ ID NO: 163 - protein, 14 aa, Artificial Sequence
  Description of Artificial Sequence: Synthetic peptide
  N-term Ac
  MOD_RES (4)..(4): Alpha-Me R8-octenyl-alanine olefin amino acid connected by an all-carbon crosslinker comprising one double bond
  misc_feature (4)..(11): Crosslink between residues
  MOD_RES (10)..(10): Cyclobutyl-Ala
  MOD_RES (11)..(11): Alpha-Me S5-pentenyl-alanine olefin amino acid connected by an all-carbon crosslinker comprising one double bond
  C-term NH2
LTFAEYWAQAASAA

SEQ ID NO: 164 - protein, 14 aa, Artificial Sequence
  Description of Artificial Sequence: Synthetic peptide
  N-term Ac
  MOD_RES (3)..(3): 3-Chloro-Phe
  MOD_RES (4)..(4): Alpha-Me R8-octenyl-alanine olefin amino acid connected by an all-carbon crosslinker comprising one double bond
  misc_feature (4)..(11): Crosslink between residues
  MOD_RES (11)..(11): Alpha-Me S5-pentenyl-alanine olefin amino acid connected by an all-carbon crosslinker comprising one double bond
  C-term NH2
LTFAEYWAQLASAA

SEQ ID NO: 165 - protein, 14 aa, Artificial Sequence
  Description of Artificial Sequence: Synthetic peptide
  N-term Ac
  MOD_RES (3)..(3): 3-Chloro-Phe
  MOD_RES (4)..(4): Alpha-Me R8-octenyl-alanine olefin amino acid connected by an all-carbon crosslinker comprising one double bond
  misc_feature (4)..(11): Crosslink between residues
  MOD_RES (11)..(11): Alpha-Me S5-pentenyl-alanine olefin amino acid connected by an all-carbon crosslinker comprising one double bond
  C-term NH2
LTFAEYWAQLASAA

SEQ ID NO: 166 - protein, 14 aa, Artificial Sequence
  Description of Artificial Sequence: Synthetic peptide
  N-term Ac
  MOD_RES (3)..(3): 3,4-difluoro Phe
  MOD_RES (4)..(4): Alpha-Me R8-octenyl-alanine olefin amino acid connected by an all-carbon crosslinker comprising one double bond
  misc_feature (4)..(11): Crosslink between residues
  MOD_RES (11)..(11): Alpha-Me S5-pentenyl-alanine olefin amino acid connected by an all-carbon crosslinker comprising one double bond
  C-term NH2
LTFAEYWAQLASAA

SEQ ID NO: 167 - protein, 14 aa, Artificial Sequence
  Description of Artificial Sequence: Synthetic peptide
  N-term Ac
  MOD_RES (3)..(3): 3,4-difluoro Phe
  MOD_RES (4)..(4): Alpha-Me R8-octenyl-alanine olefin amino acid connected by an all-carbon crosslinker comprising one double bond
  misc_feature (4)..(11): Crosslink between residues
  MOD_RES (11)..(11): Alpha-Me S5-pentenyl-alanine olefin amino acid connected by an all-carbon crosslinker comprising one double bond
  C-term NH2
LTFAEYWAQLASAA

SEQ ID NO: 168 - protein, 14 aa, Artificial Sequence
  Description of Artificial Sequence: Synthetic peptide
  N-term Ac
  MOD_RES (3)..(3): 3,4-difluoro Phe
  MOD_RES (4)..(4): Alpha-Me R8-octenyl-alanine olefin amino acid connected by an all-carbon crosslinker comprising one double bond
  misc_feature (4)..(11): Crosslink between residues
  MOD_RES (10)..(10): hLeu
  MOD_RES (11)..(11): Alpha-Me S5-pentenyl-alanine olefin amino acid connected by an all-carbon crosslinker comprising one double bond
  C-term NH2
LTFAEYWAQLASAA

SEQ ID NO: 169 - protein, 14 aa, Artificial Sequence
  Description of Artificial Sequence: Synthetic peptide
  N-term Ac
  MOD_RES (3)..(3): 3,4-difluoro Phe
  MOD_RES (4)..(4): Alpha-Me R8-octenyl-alanine olefin amino acid connected by an all-carbon crosslinker comprising one double bond
  misc_feature (4)..(11): Crosslink between residues
  MOD_RES (10)..(10): hLeu
  MOD_RES (11)..(11): Alpha-Me S5-pentenyl-alanine olefin amino acid connected by an all-carbon crosslinker comprising one double bond
  C-term NH2
LTFAEYWAQLASAA

SEQ ID NO: 170 - protein, 14 aa, Artificial Sequence
  Description of Artificial Sequence: Synthetic peptide
  N-term Ac
  MOD_RES (4)..(4): Alpha-Me R8-octenyl-alanine olefin amino acid connected by an all-carbon crosslinker comprising one double bond
  misc_feature (4)..(11): Crosslink between residues
  MOD_RES (11)..(11): Alpha-Me S5-pentenyl-alanine olefin amino acid connected by an all-carbon crosslinker comprising one double bond
  C-term NH2
ETFAEYWAQLASAA

SEQ ID NO: 171 - protein, 14 aa, Artificial Sequence
  Description of Artificial Sequence: Synthetic peptide
  N-term Ac
  MOD_RES (4)..(4): Alpha-Me R8-octenyl-alanine olefin amino acid connected by an all-carbon crosslinker comprising one double bond
  misc_feature (4)..(11): Crosslink between residues
  MOD_RES (11)..(11): Alpha-Me S5-pentenyl-alanine olefin amino acid connected by an all-carbon crosslinker comprising one double bond
  C-term NH2
LTFAAYWVQLASAA

SEQ ID NO: 172 - protein, 14 aa, Artificial Sequence
  Description of Artificial Sequence: Synthetic peptide
  N-term Ac
  MOD_RES (4)..(4): Alpha-Me R8-octenyl-alanine olefin amino acid connected by an all-carbon crosslinker comprising one double bond
  misc_feature (4)..(11): Crosslink between residues
  MOD_RES (11)..(11): Alpha-Me S5-pentenyl-alanine olefin amino acid connected by an all-carbon crosslinker comprising one double bond
  C-term NH2
LTFAAHWAQLASAA

SEQ ID NO: 173 - protein, 14 aa, Artificial Sequence
  Description of Artificial Sequence: Synthetic peptide
  N-term Ac
  MOD_RES (4)..(4): Alpha-Me R8-octenyl-alanine olefin amino acid connected by an all-carbon crosslinker comprising one double bond
  misc_feature (4)..(11): Crosslink between residues
  MOD_RES (11)..(11): Alpha-Me S5-pentenyl-alanine olefin amino acid connected by an all-carbon crosslinker comprising one double bond
  C-term NH2
LTFAAEWAQLASAA

SEQ ID NO: 174 - protein, 14 aa, Artificial Sequence
  Description of Artificial Sequence: Synthetic peptide
  N-term Ac
  MOD_RES (4)..(4): Alpha-Me R8-octenyl-alanine olefin amino acid connected by an all-carbon crosslinker comprising one double bond
  misc_feature (4)..(11): Crosslink between residues
  MOD_RES (11)..(11): Alpha-Me S5-pentenyl-alanine olefin amino acid connected by an all-carbon crosslinker comprising one double bond
  C-term NH2
LTFAASWAQLASAA

SEQ ID NO: 175 - protein, 14 aa, Artificial Sequence
  Description of Artificial Sequence: Synthetic peptide
  N-term Ac
  MOD_RES (4)..(4): Alpha-Me R8-octenyl-alanine olefin amino acid connected by an all-carbon crosslinker comprising one double bond
  misc_feature (4)..(11): Crosslink between residues
  MOD_RES (11)..(11): Alpha-Me S5-pentenyl-alanine olefin amino acid connected by an all-carbon crosslinker comprising one double bond
  C-term NH2
LTFAAEWAQLASAA

SEQ ID NO: 176 - protein, 14 aa, Artificial Sequence
  Description of Artificial Sequence: Synthetic peptide
  N-term Ac
  MOD_RES (4)..(4): Alpha-Me R8-octenyl-alanine olefin amino acid connected by an all-carbon crosslinker comprising one double bond
  misc_feature (4)..(11): Crosslink between residues
  MOD_RES (11)..(11): Alpha-Me S5-pentenyl-alanine olefin amino acid connected by an all-carbon crosslinker comprising one double bond
  C-term NH2
LTFAASWAQLASAA

SEQ ID NO: 177 - protein, 14 aa, Artificial Sequence
  Description of Artificial Sequence: Synthetic peptide
  N-term Ac
  MOD_RES (4)..(4): Alpha-Me R8-octenyl-alanine olefin amino acid connected by an all-carbon crosslinker comprising one double bond
  misc_feature (4)..(11): Crosslink between residues
  MOD_RES (6)..(6): 4-carboxy Phe
  MOD_RES (11)..(11): Alpha-Me S5-pentenyl-alanine olefin amino acid connected by an all-carbon crosslinker comprising one double bond
  C-term NH2
LTFAAFWAQLASAA

SEQ ID NO: 178 - protein, 14 aa, Artificial Sequence
  Description of Artificial Sequence: Synthetic peptide
  N-term Ac
  MOD_RES (4)..(4): Alpha-Me R8-octenyl-alanine olefin amino acid connected by an all-carbon crosslinker comprising one double bond
  misc_feature (4)..(11): Crosslink between residues
  MOD_RES (6)..(6): 4-carboxy Phe
  MOD_RES (11)..(11): Alpha-Me S5-pentenyl-alanine olefin amino acid connected by an all-carbon crosslinker comprising one double bond
  C-term NH2
LTFAAFWAQLASAA

SEQ ID NO: 179 - protein, 15 aa, Artificial Sequence
  Description of Artificial Sequence: Synthetic peptide
  N-term Ac
  MOD_RES (4)..(4): Alpha-Me R8-octenyl-alanine olefin amino acid connected by an all-carbon crosslinker comprising one double bond
  misc_feature (4)..(11): Crosslink between residues
  MOD_RES (11)..(11): Alpha-Me S5-pentenyl-alanine olefin amino acid connected by an all-carbon crosslinker comprising one double bond
  MOD_RES (15)..(15): D-amino acid
  C-term NH2
LTFAAHWAQLAAAIA

SEQ ID NO: 180 - protein, 15 aa, Artificial Sequence
  Description of Artificial Sequence: Synthetic peptide
  N-term Ac
  MOD_RES (4)..(4): Alpha-Me R8-octenyl-alanine olefin amino acid connected by an all-carbon crosslinker comprising one double bond
  misc_feature (4)..(11): Crosslink between residues
  MOD_RES (11)..(11): Alpha-Me S5-pentenyl-alanine olefin amino acid connected by an all-carbon crosslinker comprising one double bond
  MOD_RES (15)..(15): D-amino acid
  C-term NH2
ITFAFYWAQLAAAIA

SEQ ID NO: 181 - protein, 15 aa, Artificial Sequence
  Description of Artificial Sequence: Synthetic peptide
  N-term Ac
  MOD_RES (4)..(4): Alpha-Me R8-octenyl-alanine olefin amino acid connected by an all-carbon crosslinker comprising one double bond
  misc_feature (4)..(11): Crosslink between residues
  MOD_RES (11)..(11): Alpha-Me S5-pentenyl-alanine olefin amino acid connected by an all-carbon crosslinker comprising one double bond
  MOD_RES (15)..(15): D-amino acid
  C-term NH2
ITFAEHWAQLAAAIA

SEQ ID NO: 182 - protein, 15 aa, Artificial Sequence
  Description of Artificial Sequence: Synthetic peptide
  N-term Ac
  MOD_RES (4)..(4): Alpha-Me R8-octenyl-alanine olefin amino acid connected by an all-carbon crosslinker comprising one double bond
  misc_feature (4)..(11): Crosslink between residues
  MOD_RES (11)..(11): Alpha-Me S5-pentenyl-alanine olefin amino acid connected by an all-carbon crosslinker comprising one double bond
  MOD_RES (15)..(15): D-amino acid
  C-term NH2
ITFAEHWAQLAAAIA

SEQ ID NO: 183 - protein, 15 aa, Artificial Sequence
  Description of Artificial Sequence: Synthetic peptide
  N-term Ac
  MOD_RES (4)..(4): Alpha-Me R8-octenyl-alanine olefin amino acid connected by an all-carbon crosslinker comprising one double bond
  misc_feature (4)..(11): Crosslink between residues
  MOD_RES (11)..(11): Alpha-Me S5-pentenyl-alanine olefin amino acid connected by an all-carbon crosslinker comprising one double bond
  MOD_RES (15)..(15): D-amino acid
  C-term NH2
ETFAEHWAQLAAAIA

SEQ ID NO: 184 - protein, 15 aa, Artificial Sequence
  Description of Artificial Sequence: Synthetic peptide
  N-term Ac
  MOD_RES (4)..(4): Alpha-Me R8-octenyl-alanine olefin amino acid connected by an all-carbon crosslinker comprising one double bond
  misc_feature (4)..(11): Crosslink between residues
  MOD_RES (11)..(11): Alpha-Me S5-pentenyl-alanine olefin amino acid connected by an all-carbon crosslinker comprising one double bond
  MOD_RES (15)..(15): D-amino acid
  C-term NH2
ETFAEHWAQLAAAIA

SEQ ID NO: 185 - protein, 15 aa, Artificial Sequence
  Description of Artificial Sequence: Synthetic peptide
  N-term Ac
  MOD_RES (4)..(4): Alpha-Me R8-octenyl-alanine olefin amino acid connected by an all-carbon crosslinker comprising one double bond
  misc_feature (4)..(11): Crosslink between residues
  MOD_RES (11)..(11): Alpha-Me S5-pentenyl-alanine olefin amino acid connected by an all-carbon crosslinker comprising one double bond
  MOD_RES (15)..(15): D-amino acid
  C-term NH2
LTFAAHWVQLAAAIA

SEQ ID NO: 186 - protein, 15 aa, Artificial Sequence
  Description of Artificial Sequence: Synthetic peptide
  N-term Ac
  MOD_RES (4)..(4): Alpha-Me R8-octenyl-alanine olefin amino acid connected by an all-carbon crosslinker comprising one double bond
  misc_feature (4)..(11): Crosslink between residues
  MOD_RES (11)..(11): Alpha-Me S5-pentenyl-alanine olefin amino acid connected by an all-carbon crosslinker comprising one double bond
  MOD_RES (15)..(15): D-amino acid
  C-term NH2
ITFAFYWVQLAAAIA

SEQ ID NO: 187 - protein, 15 aa, Artificial Sequence
  Description of Artificial Sequence: Synthetic peptide
  N-term Ac
  MOD_RES (4)..(4): Alpha-Me R8-octenyl-alanine olefin amino acid connected by an all-carbon crosslinker comprising one double bond
  misc_feature (4)..(11): Crosslink between residues
  MOD_RES (11)..(11): Alpha-Me S5-pentenyl-alanine olefin amino acid connected by an all-carbon crosslinker comprising one double bond
  MOD_RES (15)..(15): D-amino acid
  C-term NH2
ITFAEYWVQLAAAIA

SEQ ID NO: 188 - protein, 15 aa, Artificial Sequence
  Description of Artificial Sequence: Synthetic peptide
  N-term Ac
  MOD_RES (4)..(4): Alpha-Me R8-octenyl-alanine olefin amino acid connected by an all-carbon crosslinker comprising one double bond
  misc_feature (4)..(11): Crosslink between residues
  MOD_RES (11)..(11): Alpha-Me S5-pentenyl-alanine olefin amino acid connected by an all-carbon crosslinker comprising one double bond
  MOD_RES (15)..(15): D-amino acid
  C-term NH2
ITFAEHWVQLAAAIA

SEQ ID NO: 189 - protein, 15 aa, Artificial Sequence
  Description of Artificial Sequence: Synthetic peptide
  N-term Ac
  MOD_RES (4)..(4): Alpha-Me R8-octenyl-alanine olefin amino acid connected by an all-carbon crosslinker comprising one double bond
  misc_feature (4)..(11): Crosslink between residues
  MOD_RES (11)..(11): Alpha-Me S5-pentenyl-alanine olefin amino acid connected by an all-carbon crosslinker comprising one double bond
  MOD_RES (15)..(15): D-amino acid
  C-term NH2
LTFAAEWAQLAAAIA

SEQ ID NO: 190 - protein, 15 aa, Artificial Sequence
  Description of Artificial Sequence: Synthetic peptide
  N-term Ac
  MOD_RES (4)..(4): Alpha-Me R8-octenyl-alanine olefin amino acid connected by an all-carbon crosslinker comprising one double bond
  misc_feature (4)..(11): Crosslink between residues
  MOD_RES (6)..(6): 4-carboxy Phe
  MOD_RES (11)..(11): Alpha-Me S5-pentenyl-alanine olefin amino acid connected by an all-carbon crosslinker comprising one double bond
  MOD_RES (15)..(15): D-amino acid
  C-term NH2
LTFAAFWAQLAAAIA

SEQ ID NO: 191 - protein, 15 aa, Artificial Sequence
  Description of Artificial Sequence: Synthetic peptide
  N-term Ac
  MOD_RES (4)..(4): Alpha-Me R8-octenyl-alanine olefin amino acid connected by an all-carbon crosslinker comprising one double bond
  misc_feature (4)..(11): Crosslink between residues
  MOD_RES (6)..(6): 4-carboxy Phe
  MOD_RES (11)..(11): Alpha-Me S5-pentenyl-alanine olefin amino acid connected by an all-carbon crosslinker comprising one double bond
  MOD_RES (15)..(15): D-amino acid
  C-term NH2
LTFAAFWAQLAAAIA

SEQ ID NO: 192 - protein, 15 aa, Artificial Sequence
  Description of Artificial Sequence: Synthetic peptide
  N-term Ac
  MOD_RES (4)..(4): Alpha-Me R8-octenyl-alanine olefin amino acid connected by an all-carbon crosslinker comprising one double bond
  misc_feature (4)..(11): Crosslink between residues
  MOD_RES (11)..(11): Alpha-Me S5-pentenyl-alanine olefin amino acid connected by an all-carbon crosslinker comprising one double bond
  C-term NH2
LTFAAHWAQLAAHFA

SEQ ID NO: 193 - protein, 15 aa, Artificial Sequence
  Description of Artificial Sequence: Synthetic peptide
  N-term Ac
  MOD_RES (4)..(4): Alpha-Me R8-octenyl-alanine olefin amino acid connected by an all-carbon crosslinker comprising one double bond
  misc_feature (4)..(11): Crosslink between residues
  MOD_RES (11)..(11): Alpha-Me S5-pentenyl-alanine olefin amino acid connected by an all-carbon crosslinker comprising one double bond
  C-term NH2
ITFAFYWAQLAAHFA

SEQ ID NO: 194 - protein, 15 aa, Artificial Sequence
  Description of Artificial Sequence: Synthetic peptide
  N-term Ac
  MOD_RES (4)..(4): Alpha-Me R8-octenyl-alanine olefin amino acid connected by an all-carbon crosslinker comprising one double bond
  misc_feature (4)..(11): Crosslink between residues
  MOD_RES (11)..(11): Alpha-Me S5-pentenyl-alanine olefin amino acid connected by an all-carbon crosslinker comprising one double bond
  C-term NH2
ITFAFYWAQLAAHFA

SEQ ID NO: 195 - protein, 15 aa, Artificial Sequence
  Description of Artificial Sequence: Synthetic peptide
  N-term Ac
  MOD_RES (4)..(4): Alpha-Me R8-octenyl-alanine olefin amino acid connected by an all-carbon crosslinker comprising one double bond
  misc_feature (4)..(11): Crosslink between residues
  MOD_RES (11)..(11): Alpha-Me S5-pentenyl-alanine olefin amino acid connected by an all-carbon crosslinker comprising one double bond
  C-term NH2
ITFAFHWAQLAAEFA

SEQ ID NO: 196 - protein, 15 aa, Artificial Sequence
  Description of Artificial Sequence: Synthetic peptide
  N-term Ac
  MOD_RES (4)..(4): Alpha-Me R8-octenyl-alanine olefin amino acid connected by an all-carbon crosslinker comprising one double bond
  misc_feature (4)..(11): Crosslink between residues
  MOD_RES (11)..(11): Alpha-Me S5-pentenyl-alanine olefin amino acid connected by an all-carbon crosslinker comprising one double bond
  C-term NH2
ITFAFHWAQLAAEFA

SEQ ID NO: 197 - protein, 15 aa, Artificial Sequence
  Description of Artificial Sequence: Synthetic peptide
  N-term Ac
  MOD_RES (4)..(4): Alpha-Me R8-octenyl-alanine olefin amino acid connected by an all-carbon crosslinker comprising one double bond
  misc_feature (4)..(11): Crosslink between residues
  MOD_RES (11)..(11): Alpha-Me S5-pentenyl-alanine olefin amino acid connected by an all-carbon crosslinker comprising one double bond
  C-term NH2
ITFAEHWAQLAAHFA

SEQ ID NO: 198 - protein, 15 aa, Artificial Sequence
  Description of Artificial Sequence: Synthetic peptide
  N-term Ac
  MOD_RES (4)..(4): Alpha-Me R8-octenyl-alanine olefin amino acid connected by an all-carbon crosslinker comprising one double bond
  misc_feature (4)..(11): Crosslink between residues
  MOD_RES (11)..(11): Alpha-Me S5-pentenyl-alanine olefin amino acid connected by an all-carbon crosslinker comprising one double bond
  C-term NH2
ITFAEHWAQLAAHFA

SEQ ID NO: 199 - protein, 15 aa, Artificial Sequence
  Description of Artificial Sequence: Synthetic peptide
  N-term Ac
  MOD_RES (4)..(4): Alpha-Me R8-octenyl-alanine olefin amino acid connected by an all-carbon crosslinker comprising one double bond
  misc_feature (4)..(11): Crosslink between residues
  MOD_RES (11)..(11): Alpha-Me S5-pentenyl-alanine olefin amino acid connected by an all-carbon crosslinker comprising one double bond
  C-term NH2
LTFAAHWVQLAAHFA

SEQ ID NO: 200 - protein, 15 aa, Artificial Sequence
  Description of Artificial Sequence: Synthetic peptide
  N-term Ac
  MOD_RES (4)..(4): Alpha-Me R8-octenyl-alanine olefin amino acid connected by an all-carbon crosslinker comprising one double bond
  misc_feature (4)..(11): Crosslink between residues
  MOD_RES (11)..(11): Alpha-Me S5-pentenyl-alanine olefin amino acid connected by an all-carbon crosslinker comprising one double bond
  C-term NH2
ITFAFYWVQLAAHFA

SEQ ID NO: 201 - protein, 15 aa, Artificial Sequence
  Description of Artificial Sequence: Synthetic peptide
  N-term Ac
  MOD_RES (4)..(4): Alpha-Me R8-octenyl-alanine olefin amino acid connected by an all-carbon crosslinker comprising one double bond
  misc_feature (4)..(11): Crosslink between residues
  MOD_RES (11)..(11): Alpha-Me S5-pentenyl-alanine olefin amino acid connected by an all-carbon crosslinker comprising one double bond
  C-term NH2
ITFAEYWVQLAAHFA

SEQ ID NO: 202 - protein, 15 aa, Artificial Sequence
  Description of Artificial Sequence: Synthetic peptide
  N-term Ac
  MOD_RES (4)..(4): Alpha-Me R8-octenyl-alanine olefin amino acid connected by an all-carbon crosslinker comprising one double bond
  misc_feature (4)..(11): Crosslink between residues
  MOD_RES (11)..(11): Alpha-Me S5-pentenyl-alanine olefin amino acid connected by an all-carbon crosslinker comprising one double bond
  C-term NH2
ITFAEHWVQLAAHFA

SEQ ID NO: 203 - protein, 15 aa, Artificial Sequence
  Description of Artificial Sequence: Synthetic peptide
  N-term Ac
  MOD_RES (4)..(4): Alpha-Me R8-octenyl-alanine olefin amino acid connected by an all-carbon crosslinker comprising one double bond
  misc_feature (4)..(11): Crosslink between residues
  MOD_RES (11)..(11): Alpha-Me S5-pentenyl-alanine olefin amino acid connected by an all-carbon crosslinker comprising one double bond
  C-term NH2
ITFAEHWVQLAAHFA

SEQ ID NO: 204 - protein, 14 aa, Artificial Sequence
  Description of Artificial Sequence: Synthetic peptide
  N-term Ac
  MOD_RES (4)..(4): Alpha-Me R8-octenyl-alanine olefin amino acid connected by an all-carbon crosslinker comprising one double bond
  misc_feature (4)..(11): Crosslink between residues
  MOD_RES (11)..(11): Alpha-Me S5-pentenyl-alanine olefin amino acid connected by an all-carbon crosslinker comprising one double bond
  C-term NH2
ETFAEYWAALASAA

SEQ ID NO: 205 - protein, 14 aa, Artificial Sequence
  Description of Artificial Sequence: Synthetic peptide
  N-term Ac
  MOD_RES (4)..(4): Alpha-Me R8-octenyl-alanine olefin amino acid connected by an all-carbon crosslinker comprising one double bond
  misc_feature (4)..(11): Crosslink between residues
  MOD_RES (11)..(11): Alpha-Me S5-pentenyl-alanine olefin amino acid connected by an all-carbon crosslinker comprising one double bond
  C-term NH2
LTFAAYWVALASAA

SEQ ID NO: 206 - protein, 14 aa, Artificial Sequence
  Description of Artificial Sequence: Synthetic peptide
  N-term Ac
  MOD_RES (4)..(4): Alpha-Me R8-octenyl-alanine olefin amino acid connected by an all-carbon crosslinker comprising one double bond
  misc_feature (4)..(11): Crosslink between residues
  MOD_RES (11)..(11): Alpha-Me S5-pentenyl-alanine olefin amino acid connected by an all-carbon crosslinker comprising one double bond
  C-term NH2
LTFAAHWAALASAA

SEQ ID NO: 207 - protein, 14 aa, Artificial Sequence
  Description of Artificial Sequence: Synthetic peptide
  N-term Ac
  MOD_RES (4)..(4): Alpha-Me R8-octenyl-alanine olefin amino acid connected by an all-carbon crosslinker comprising one double bond
  misc_feature (4)..(11): Crosslink between residues
  MOD_RES (11)..(11): Alpha-Me S5-pentenyl-alanine olefin amino acid connected by an all-carbon crosslinker comprising one double bond
  C-term NH2
LTFAAEWAALASAA

SEQ ID NO: 208 - protein, 14 aa, Artificial Sequence
  Description of Artificial Sequence: Synthetic peptide
  N-term Ac
  MOD_RES (4)..(4): Alpha-Me R8-octenyl-alanine olefin amino acid connected by an all-carbon crosslinker comprising one double bond
  misc_feature (4)..(11): Crosslink between residues
  MOD_RES (11)..(11): Alpha-Me S5-pentenyl-alanine olefin amino acid connected by an all-carbon crosslinker comprising one double bond
  C-term NH2
LTFAAEWAALASAA

SEQ ID NO: 209 - protein, 14 aa, Artificial Sequence
  Description of Artificial Sequence: Synthetic peptide
  N-term Ac
  MOD_RES (4)..(4): Alpha-Me R8-octenyl-alanine olefin amino acid connected by an all-carbon crosslinker comprising one double bond
  misc_feature (4)..(11): Crosslink between residues
  MOD_RES (11)..(11): Alpha-Me S5-pentenyl-alanine olefin amino acid connected by an all-carbon crosslinker comprising one double bond
  C-term NH2
LTFAASWAALASAA

SEQ ID NO: 210 - protein, 14 aa, Artificial Sequence
  Description of Artificial Sequence: Synthetic peptide
  N-term Ac
  MOD_RES (4)..(4): Alpha-Me R8-octenyl-alanine olefin amino acid connected by an all-carbon crosslinker comprising one double bond
  misc_feature (4)..(11): Crosslink between residues
  MOD_RES (11)..(11): Alpha-Me S5-pentenyl-alanine olefin amino acid connected by an all-carbon crosslinker comprising one double bond
  C-term NH2
LTFAASWAALASAA

SEQ ID NO: 211 - protein, 15 aa, Artificial Sequence
  Description of Artificial Sequence: Synthetic peptide
  N-term Ac
  MOD_RES (4)..(4): Alpha-Me R8-octenyl-alanine olefin amino acid connected by an all-carbon crosslinker comprising one double bond
  misc_feature (4)..(11): Crosslink between residues
  MOD_RES (11)..(11): Alpha-Me S5-pentenyl-alanine olefin amino acid connected by an all-carbon crosslinker comprising one double bond
  MOD_RES (15)..(15): D-amino acid
  C-term NH2
LTFAAYWAALAAAIA

SEQ ID NO: 212 - protein, 15 aa, Artificial Sequence
  Description of Artificial Sequence: Synthetic peptide
  N-term Ac
  MOD_RES (4)..(4): Alpha-Me R8-octenyl-alanine olefin amino acid connected by an all-carbon crosslinker comprising one double bond
  misc_feature (4)..(11): Crosslink between residues
  MOD_RES (11)..(11): Alpha-Me S5-pentenyl-alanine olefin amino acid connected by an all-carbon crosslinker comprising one double bond
  MOD_RES (15)..(15): D-amino acid
  C-term NH2
LTFAAYWAALAAAIA

SEQ ID NO: 213 - protein, 15 aa, Artificial Sequence
  Description of Artificial Sequence: Synthetic peptide
  N-term Ac
  MOD_RES (4)..(4): Alpha-Me R8-octenyl-alanine olefin amino acid connected by an all-carbon crosslinker comprising one double bond
  misc_feature (4)..(11): Crosslink between residues
  MOD_RES (11)..(11): Alpha-Me S5-pentenyl-alanine olefin amino acid connected by an all-carbon crosslinker comprising one double bond
  C-term NH2
LTFAAYWAALAAHFA

SEQ ID NO: 214 - protein, 15 aa, Artificial Sequence
  Description of Artificial Sequence: Synthetic peptide
  N-term Ac
  MOD_RES (4)..(4): Alpha-Me R8-octenyl-alanine olefin amino acid connected by an all-carbon crosslinker comprising one double bond
  misc_feature (4)..(11): Crosslink between residues
  MOD_RES (11)..(11): Alpha-Me S5-pentenyl-alanine olefin amino acid connected by an all-carbon crosslinker comprising one double bond
  MOD_RES (15)..(15): D-amino acid
  C-term NH2
LTFAEHWAQLAAHIA

SEQ ID NO: 215 - protein, 15 aa, Artificial Sequence
  Description of Artificial Sequence: Synthetic peptide
  N-term Ac
  MOD_RES (4)..(4): Alpha-Me R8-octenyl-alanine olefin amino acid connected by an all-carbon crosslinker comprising one double bond
  misc_feature (4)..(11): Crosslink between residues
  MOD_RES (11)..(11): Alpha-Me S5-pentenyl-alanine olefin amino acid connected by an all-carbon crosslinker comprising one double bond
  MOD_RES (15)..(15): D-amino acid
  C-term NH2
LTFAEHWAQLAAHIA

SEQ ID NO: 216 - protein, 15 aa, Artificial Sequence
  Description of Artificial Sequence: Synthetic peptide
  N-term Ac
  MOD_RES (4)..(4): Alpha-Me R8-octenyl-alanine olefin amino acid connected by an all-carbon crosslinker comprising one double bond
  misc_feature (4)..(11): Crosslink between residues
  MOD_RES (11)..(11): Alpha-Me S5-pentenyl-alanine olefin amino acid connected by an all-carbon crosslinker comprising one double bond
  MOD_RES (15)..(15): D-amino acid
  C-term NH2
LTFAAHWAQLAAHIA

SEQ ID NO: 217 - protein, 15 aa, Artificial Sequence
  Description of Artificial Sequence: Synthetic peptide
  N-term Ac
  MOD_RES (4)..(4): Alpha-Me R8-octenyl-alanine olefin amino acid connected by an all-carbon crosslinker comprising one double bond
  misc_feature (4)..(11): Crosslink between residues
  MOD_RES (11)..(11): Alpha-Me S5-pentenyl-alanine olefin amino acid connected by an all-carbon crosslinker comprising one double bond
  MOD_RES (15)..(15): D-amino acid
  C-term NH2
LTFAEYWAQLAAHIA

SEQ ID NO: 218 - protein, 15 aa, Artificial Sequence
  Description of Artificial Sequence: Synthetic peptide
  N-term Ac
  MOD_RES (4)..(4): Alpha-Me R8-octenyl-alanine olefin amino acid connected by an all-carbon crosslinker comprising one double bond
  misc_feature (4)..(11): Crosslink between residues
  MOD_RES (11)..(11): Alpha-Me S5-pentenyl-alanine olefin amino acid connected by an all-carbon crosslinker comprising one double bond
  MOD_RES (15)..(15): D-amino acid
  C-term NH2
LTFAAYWAQLAAAFA

SEQ ID NO: 219 - protein, 15 aa, Artificial Sequence
  Description of Artificial Sequence: Synthetic peptide
  N-term Ac
  MOD_RES (4)..(4): Alpha-Me R8-octenyl-alanine olefin amino acid connected by an all-carbon crosslinker comprising one double bond
  misc_feature (4)..(11): Crosslink between residues
  MOD_RES (11)..(11): Alpha-Me S5-pentenyl-alanine olefin amino acid connected by an all-carbon crosslinker comprising one double bond
  MOD_RES (15)..(15): D-amino acid
  C-term NH2
LTFAAYWAQLAAAFA

SEQ ID NO: 220 - protein, 15 aa, Artificial Sequence
  Description of Artificial Sequence: Synthetic peptide
  N-term Ac
  MOD_RES (4)..(4): Alpha-Me R8-octenyl-alanine olefin amino acid connected by an all-carbon crosslinker comprising one double bond
  misc_feature (4)..(11): Crosslink between residues
  MOD_RES (11)..(11): Alpha-Me S5-pentenyl-alanine olefin amino acid connected by an all-carbon crosslinker comprising one double bond
  MOD_RES (15)..(15): D-amino acid
  C-term NH2
LTFAAYWAQLAAAWA

SEQ ID NO: 221 - protein, 15 aa, Artificial Sequence
  Description of Artificial Sequence: Synthetic peptide
  N-term Ac
  MOD_RES (4)..(4): Alpha-Me R8-octenyl-alanine olefin amino acid connected by an all-carbon crosslinker comprising one double bond
  misc_feature (4)..(11): Crosslink between residues
  MOD_RES (11)..(11): Alpha-Me S5-pentenyl-alanine olefin amino acid connected by an all-carbon crosslinker comprising one double bond
  MOD_RES (15)..(15): D-amino acid
  C-term NH2
LTFAAYWAQLAAAVA

SEQ ID NO: 222 - protein, 15 aa, Artificial Sequence
  Description of Artificial Sequence: Synthetic peptide
  N-term Ac
  MOD_RES (4)..(4): Alpha-Me R8-octenyl-alanine olefin amino acid connected by an all-carbon crosslinker comprising one double bond
  misc_feature (4)..(11): Crosslink between residues
  MOD_RES (11)..(11): Alpha-Me S5-pentenyl-alanine olefin amino acid connected by an all-carbon crosslinker comprising one double bond
  MOD_RES (15)..(15): D-amino acid
  C-term NH2
LTFAAYWAQLAAAVA

SEQ ID NO: 223 - protein, 15 aa, Artificial Sequence
  Description of Artificial Sequence: Synthetic peptide
  N-term Ac
  MOD_RES (4)..(4): Alpha-Me R8-octenyl-alanine olefin amino acid connected by an all-carbon crosslinker comprising one double bond
  misc_feature (4)..(11): Crosslink between residues
  MOD_RES (11)..(11): Alpha-Me S5-pentenyl-alanine olefin amino acid connected by an all-carbon crosslinker comprising one double bond
  MOD_RES (15)..(15): D-amino acid
  C-term NH2
LTFAAYWAQLAAALA

SEQ ID NO: 224 - protein, 15 aa, Artificial Sequence
  Description of Artificial Sequence: Synthetic peptide
  N-term Ac
  MOD_RES (4)..(4): Alpha-Me R8-octenyl-alanine olefin amino acid connected by an all-carbon crosslinker comprising one double bond
  misc_feature (4)..(11): Crosslink between residues
  MOD_RES (11)..(11): Alpha-Me S5-pentenyl-alanine olefin amino acid connected by an all-carbon crosslinker comprising one double bond
  MOD_RES (15)..(15): D-amino acid
  C-term NH2
LTFAAYWAQLAAALA

SEQ ID NO: 225 - protein, 15 aa, Artificial Sequence
  Description of Artificial Sequence: Synthetic peptide
  N-term Ac
  MOD_RES (4)..(4): Alpha-Me R8-octenyl-alanine olefin amino acid connected by an all-carbon crosslinker comprising one double bond
  misc_feature (4)..(11): Crosslink between residues
  MOD_RES (11)..(11): Alpha-Me S5-pentenyl-alanine olefin amino acid connected by an all-carbon crosslinker comprising one double bond
  MOD_RES (15)..(15): D-amino acid
  C-term NH2
LTFAEYWAQLAAAIA

SEQ ID NO: 226 - protein, 15 aa, Artificial Sequence
  Description of Artificial Sequence: Synthetic peptide
  N-term Ac
  MOD_RES (4)..(4): Alpha-Me R8-octenyl-alanine olefin amino acid connected by an all-carbon crosslinker comprising one double bond
  misc_feature (4)..(11): Crosslink between residues
  MOD_RES (11)..(11): Alpha-Me S5-pentenyl-alanine olefin amino acid connected by an all-carbon crosslinker comprising one double bond
  MOD_RES (15)..(15): D-amino acid
  C-term NH2
LTFAEYWAQLAAAIA

SEQ ID NO: 227 - protein, 15 aa, Artificial Sequence
  Description of Artificial Sequence: Synthetic peptide
  N-term Ac
  MOD_RES (4)..(4): Alpha-Me R8-octenyl-alanine olefin amino acid connected by an all-carbon crosslinker comprising one double bond
  misc_feature (4)..(11): Crosslink between residues
  MOD_RES (11)..(11): Alpha-Me S5-pentenyl-alanine olefin amino acid connected by an all-carbon crosslinker comprising one double bond
  MOD_RES (15)..(15): D-amino acid
  C-term NH2
LTFAEYWAQLAAAFA

SEQ ID NO: 228 - protein, 15 aa, Artificial Sequence
  Description of Artificial Sequence: Synthetic peptide
  N-term Ac
  MOD_RES (4)..(4): Alpha-Me R8-octenyl-alanine olefin amino acid connected by an all-carbon crosslinker comprising one double bond
  misc_feature (4)..(11): Crosslink between residues
  MOD_RES (11)..(11): Alpha-Me S5-pentenyl-alanine olefin amino acid connected by an all-carbon crosslinker comprising one double bond
  MOD_RES (15)..(15): D-amino acid
  C-term NH2
LTFAEYWAQLAAAFA

SEQ ID NO: 229 - protein, 15 aa, Artificial Sequence
  Description of Artificial Sequence: Synthetic peptide
  N-term Ac
  MOD_RES (4)..(4): Alpha-Me R8-octenyl-alanine olefin amino acid connected by an all-carbon crosslinker comprising one double bond
  misc_feature (4)..(11): Crosslink between residues
  MOD_RES (11)..(11): Alpha-Me S5-pentenyl-alanine olefin amino acid connected by an all-carbon crosslinker comprising one double bond
  MOD_RES (15)..(15): D-amino acid
  C-term NH2
LTFAEYWAQLAAAVA

SEQ ID NO: 230 - protein, 15 aa, Artificial Sequence
  Description of Artificial Sequence: Synthetic peptide
  N-term Ac
  MOD_RES (4)..(4): Alpha-Me R8-octenyl-alanine olefin amino acid connected by an all-carbon crosslinker comprising one double bond
  misc_feature (4)..(11): Crosslink between residues
  MOD_RES (11)..(11): Alpha-Me S5-pentenyl-alanine olefin amino acid connected by an all-carbon crosslinker comprising one double bond
  MOD_RES (15)..(15): D-amino acid
  C-term NH2
LTFAEYWAQLAAAVA

SEQ ID NO: 231 - protein, 15 aa, Artificial Sequence
  Description of Artificial Sequence: Synthetic peptide
  N-term Ac
  MOD_RES (4)..(4): Alpha-Me R8-octenyl-alanine olefin amino acid connected by an all-carbon crosslinker comprising one double bond
  misc_feature (4)..(11): Crosslink between residues
  MOD_RES (11)..(11): Alpha-Me S5-pentenyl-alanine olefin amino acid connected by an all-carbon crosslinker comprising one double bond
  MOD_RES (15)..(15): D-amino acid
  C-term NH2
LTFAEHWAQLAAAIA

SEQ ID NO: 232 - protein, 15 aa, Artificial Sequence
  Description of Artificial Sequence: Synthetic peptide
  N-term Ac
  MOD_RES (4)..(4): Alpha-Me R8-octenyl-alanine olefin amino acid connected by an all-carbon crosslinker comprising one double bond
  misc_feature (4)..(11): Crosslink between residues
  MOD_RES (11)..(11): Alpha-Me S5-pentenyl-alanine olefin amino acid connected by an all-carbon crosslinker comprising one double bond
  MOD_RES (15)..(15): D-amino acid
  C-term NH2
LTFAEHWAQLAAAIA

SEQ ID NO: 233 - protein, 15 aa, Artificial Sequence
  Description of Artificial Sequence: Synthetic peptide
  N-term Ac
  MOD_RES (4)..(4): Alpha-Me R8-octenyl-alanine olefin amino acid connected by an all-carbon crosslinker comprising one double bond
  misc_feature (4)..(11): Crosslink between residues
  MOD_RES (11)..(11): Alpha-Me S5-pentenyl-alanine olefin amino acid connected by an all-carbon crosslinker comprising one double bond
  MOD_RES (15)..(15): D-amino acid
  C-term NH2
LTFAEHWAQLAAAWA

SEQ ID NO: 234 - protein, 15 aa, Artificial Sequence
  Description of Artificial Sequence: Synthetic peptide
  N-term Ac
  MOD_RES (4)..(4): Alpha-Me R8-octenyl-alanine olefin amino acid connected by an all-carbon crosslinker comprising one double bond
  misc_feature (4)..(11): Crosslink between residues
  MOD_RES (11)..(11): Alpha-Me S5-pentenyl-alanine olefin amino acid connected by an all-carbon crosslinker comprising one double bond
  MOD_RES (15)..(15): D-amino acid
  C-term NH2
LTFAEHWAQLAAAWA

SEQ ID NO: 235 - protein, 15 aa, Artificial Sequence
  Description of Artificial Sequence: Synthetic peptide
  N-term Ac
  MOD_RES (4)..(4): Alpha-Me R8-octenyl-alanine olefin amino acid connected by an all-carbon crosslinker comprising one double bond
  misc_feature (4)..(11): Crosslink between residues
  MOD_RES (11)..(11): Alpha-Me S5-pentenyl-alanine olefin amino acid connected by an all-carbon crosslinker comprising one double bond
  MOD_RES (15)..(15): D-amino acid
  C-term NH2
LTFAEHWAQLAAALA

SEQ ID NO: 236 - protein, 15 aa, Artificial Sequence
  Description of Artificial Sequence: Synthetic peptide
  N-term Ac
  MOD_RES (4)..(4): Alpha-Me R8-octenyl-alanine olefin amino acid connected by an all-carbon crosslinker comprising one double bond
  misc_feature (4)..(11): Crosslink between residues
  MOD_RES (11)..(11): Alpha-Me S5-pentenyl-alanine olefin amino acid connected by an all-carbon crosslinker comprising one double bond
  MOD_RES (15)..(15): D-amino acid
  C-term NH2
LTFAEHWAQLAAALA

SEQ ID NO: 237 - protein, 15 aa, Artificial Sequence
  Description of Artificial Sequence: Synthetic peptide
  N-term Ac
  MOD_RES (4)..(4): Alpha-Me R8-octenyl-alanine olefin amino acid connected by an all-carbon crosslinker comprising one double bond
  misc_feature (4)..(11): Crosslink between residues
  MOD_RES (11)..(11): Alpha-Me S5-pentenyl-alanine olefin amino acid connected by an all-carbon crosslinker comprising one double bond
  MOD_RES (15)..(15): D-amino acid
  C-term NH2
ETFAEHWVQLAAALA

SEQ ID NO: 238 - protein, 15 aa, Artificial Sequence
  Description of Artificial Sequence: Synthetic peptide
  N-term Ac
  MOD_RES (4)..(4): Alpha-Me R8-octenyl-alanine olefin amino acid connected by an all-carbon crosslinker comprising one double bond
  misc_feature (4)..(11): Crosslink between residues
  MOD_RES (11)..(11): Alpha-Me S5-pentenyl-alanine olefin amino acid connected by an all-carbon crosslinker comprising one double bond
  MOD_RES (15)..(15): D-amino acid
  C-term NH2
LTFAAYWAQLAAAAA

SEQ ID NO: 239 - protein, 15 aa, Artificial Sequence
  Description of Artificial Sequence: Synthetic peptide
  N-term Ac
  MOD_RES (4)..(4): Alpha-Me R8-octenyl-alanine olefin amino acid connected by an all-carbon crosslinker comprising one double bond
  misc_feature (4)..(11): Crosslink between residues
  MOD_RES (11)..(11): Alpha-Me S5-pentenyl-alanine olefin amino acid connected by an all-carbon crosslinker comprising one double bond
  MOD_RES (15)..(15): D-amino acid
  C-term NH2
LTFAAYWAQLAAAAA

SEQ ID NO: 240 - protein, 15 aa, Artificial Sequence
  Description of Artificial Sequence: Synthetic peptide
  N-term Ac
  MOD_RES (4)..(4): Alpha-Me R8-octenyl-alanine olefin amino acid connected by an all-carbon crosslinker comprising one double bond
  misc_feature (4)..(11): Crosslink between residues
  MOD_RES (11)..(11): Alpha-Me S5-pentenyl-alanine olefin amino acid connected by an all-carbon crosslinker comprising one double bond
  MOD_RES (14)..(14): 2-aminoisobutyric acid
  C-term NH2
LTFAAYWAQLAAAXA

SEQ ID NO: 241 - protein, 15 aa, Artificial Sequence
  Description of Artificial Sequence: Synthetic peptide
  N-term Ac
  MOD_RES (4)..(4): Alpha-Me R8-octenyl-alanine olefin amino acid connected by an all-carbon crosslinker comprising one double bond
  misc_feature (4)..(11): Crosslink between residues
  MOD_RES (11)..(11): Alpha-Me S5-pentenyl-alanine olefin amino acid connected by an all-carbon crosslinker comprising one double bond
  MOD_RES (14)..(14): 2-aminoisobutyric acid
  C-term NH2
LTFAAYWAQLAAAXA

SEQ ID NO: 242 - protein, 16 aa, Artificial Sequence
  Description of Artificial Sequence: Synthetic peptide
  N-term Ac
  MOD_RES (4)..(4): Alpha-Me R8-octenyl-alanine olefin amino acid connected by an all-carbon crosslinker comprising one double bond
  misc_feature (4)..(11): Crosslink between residues
  MOD_RES (11)..(11): Alpha-Me S5-pentenyl-alanine olefin amino acid connected by an all-carbon crosslinker comprising one double bond
  MOD_RES (16)..(16): D-amino acid
  C-term NH2
LTFAAYWAQLAAAAAA

SEQ ID NO: 243 - protein, 15 aa, Artificial Sequence
  Description of Artificial Sequence: Synthetic peptide
  N-term Ac
  MOD_RES (4)..(4): Alpha-Me R5-pentenyl-alanine olefin amino acid connected by an all-carbon crosslinker comprising one double bond
  misc_feature (4)..(11): Crosslink between residues
  MOD_RES (11)..(11): Alpha-Me S8-octenyl-alanine olefin amino acid connected by an all-carbon crosslinker comprising one double bond
  MOD_RES (15)..(15): D-amino acid
  C-term NH2
LTFAAYWAQLAAAIA

SEQ ID NO: 244 - protein, 14 aa, Artificial Sequence
  Description of Artificial Sequence: Synthetic peptide
  N-term Ac
  MOD_RES (4)..(4): Alpha-Me R5-pentenyl-alanine olefin amino acid connected by an all-carbon crosslinker comprising one double bond
  misc_feature (4)..(11): Crosslink between residues
  MOD_RES (11)..(11): Alpha-Me S8-octenyl-alanine olefin amino acid connected by an all-carbon crosslinker comprising one double bond
  C-term NH2
LTFAAYWAQLASAA

SEQ ID NO: 245 - protein, 15 aa, Artificial Sequence
  Description of Artificial Sequence: Synthetic peptide
  N-term Ac
  MOD_RES (4)..(4): Alpha-Me R8-octenyl-alanine olefin amino acid connected by an all-carbon crosslinker comprising one double bond
  misc_feature (4)..(11): Crosslink between residues
  MOD_RES (10)..(10): Cyclobutyl-Ala
  MOD_RES (11)..(11): Alpha-Me S5-pentenyl-alanine olefin amino acid connected by an all-carbon crosslinker comprising one double bond
  MOD_RES (14)..(14): Norleucine
  C-term NH2
LTFAAYWAQAAAALA

SEQ ID NO: 246 - protein, 15 aa, Artificial Sequence
  Description of Artificial Sequence: Synthetic peptide
  N-term Ac
  MOD_RES (4)..(4): Alpha-Me R8-octenyl-alanine olefin amino acid connected by an all-carbon crosslinker comprising one double bond
  misc_feature (4)..(11): Crosslink between residues
  MOD_RES (10)..(10): Cyclobutyl-Ala
  MOD_RES (11)..(11): Alpha-Me S5-pentenyl-alanine olefin amino acid connected by an all-carbon crosslinker comprising one double bond
  MOD_RES (14)..(14): Norleucine
  C-term NH2
ETFAAYWAQAAAALA

SEQ ID NO: 247 - protein, 15 aa, Artificial Sequence
  Description of Artificial Sequence: Synthetic peptide
  N-term Ac
  MOD_RES (4)..(4): Alpha-Me R8-octenyl-alanine olefin amino acid connected by an all-carbon crosslinker comprising one double bond
  misc_feature (4)..(11): Crosslink between residues
  MOD_RES (10)..(10): Cyclobutyl-Ala
  MOD_RES (11)..(11): Alpha-Me S5-pentenyl-alanine olefin amino acid connected by an all-carbon crosslinker comprising one double bond
  MOD_RES (14)..(14): Norleucine
  C-term NH2
LTFAEYWAQAAAALA

SEQ ID NO: 248 - protein, 15 aa, Artificial Sequence
  Description of Artificial Sequence: Synthetic peptide
  N-term Ac
  MOD_RES (4)..(4): Alpha-Me R8-octenyl-alanine olefin amino acid connected by an all-carbon crosslinker comprising one double bond
  misc_feature (4)..(11): Crosslink between residues
  MOD_RES (10)..(10): Cyclobutyl-Ala
  MOD_RES (11)..(11): Alpha-Me S5-pentenyl-alanine olefin amino acid connected by an all-carbon crosslinker comprising one double bond
  MOD_RES (14)..(14): Norleucine
  C-term NH2
LTFAAYWAQAAAWLA

SEQ ID NO: 249 - protein, 15 aa, Artificial Sequence
  Description of Artificial Sequence: Synthetic peptide
  N-term Ac
  MOD_RES (4)..(4): Alpha-Me R8-octenyl-alanine olefin amino acid connected by an all-carbon crosslinker comprising one double bond
  misc_feature (4)..(11): Crosslink between residues
  MOD_RES (10)..(10): Cyclobutyl-Ala
  MOD_RES (11)..(11): Alpha-Me S5-pentenyl-alanine olefin amino acid connected by an all-carbon crosslinker comprising one double bond
  MOD_RES (14)..(14): Norleucine
  C-term NH2
ETFAAYWAQAAAWLA

SEQ ID NO: 250 - protein, 15 aa, Artificial Sequence
  Description of Artificial Sequence: Synthetic peptide
  N-term Ac
  MOD_RES (4)..(4): Alpha-Me R8-octenyl-alanine olefin amino acid connected by an all-carbon crosslinker comprising one double bond
  misc_feature (4)..(11): Crosslink between residues
  MOD_RES (10)..(10): Cyclobutyl-Ala
  MOD_RES (11)..(11): Alpha-Me S5-pentenyl-alanine olefin amino acid connected by an all-carbon crosslinker comprising one double bond
  MOD_RES (14)..(14): Norleucine
  C-term NH2
LTFAEYWAQAAAWLA

SEQ ID NO: 251 - protein, 15 aa, Artificial Sequence
  Description of Artificial Sequence: Synthetic peptide
  N-term Ac
  MOD_RES (4)..(4): Alpha-Me R8-octenyl-alanine olefin amino acid connected by an all-carbon crosslinker comprising one double bond
  misc_feature (4)..(11): Crosslink between residues
  MOD_RES (10)..(10): Cyclobutyl-Ala
  MOD_RES (11)..(11): Alpha-Me S5-pentenyl-alanine olefin amino acid connected by an all-carbon crosslinker comprising one double bond
  C-term NH2
LTFAEYWAQAASAFA

SEQ ID NO: 252 - protein, 15 aa, Artificial Sequence
  Description of Artificial Sequence: Synthetic peptide
  N-term Ac
  MOD_RES (3)..(3): 3,4-difluoro Phe
  MOD_RES (4)..(4): Alpha-Me R8-octenyl-alanine olefin amino acid connected by an all-carbon crosslinker comprising one double bond
  misc_feature (4)..(11): Crosslink between residues
  MOD_RES (10)..(10): Cyclobutyl-Ala
  MOD_RES (11)..(11): Alpha-Me S5-pentenyl-alanine olefin amino acid connected by an all-carbon crosslinker comprising one double bond
  MOD_RES (14)..(14): Norleucine
  C-term NH2
LTFAEYWAQAASALA

SEQ ID NO: 253 - protein, 15 aa, Artificial Sequence
  Description of Artificial Sequence: Synthetic peptide
  N-term Ac
  MOD_RES (4)..(4): Alpha-Me R8-octenyl-alanine olefin amino acid connected by an all-carbon crosslinker comprising one double bond
  misc_feature (4)..(11): Crosslink between residues
  MOD_RES (6)..(6): 4-carboxy Phe
  MOD_RES (10)..(10): Cyclobutyl-Ala
  MOD_RES (11)..(11): Alpha-Me S5-pentenyl-alanine olefin amino acid connected by an all-carbon crosslinker comprising one double bond
  MOD_RES (14)..(14): Norleucine
  C-term NH2
LTFAEFWAQAASALA

SEQ ID NO: 254 - protein, 15 aa, Artificial Sequence
  Description of Artificial Sequence: Synthetic peptide
  N-term Ac
  MOD_RES (4)..(4): Alpha-Me R8-octenyl-alanine olefin amino acid connected by an all-carbon crosslinker comprising one double bond
  misc_feature (4)..(11): Crosslink between residues
  MOD_RES (10)..(10): Cyclobutyl-Ala
  MOD_RES (11)..(11): Alpha-Me S5-pentenyl-alanine olefin amino acid connected by an all-carbon crosslinker comprising one double bond
  MOD_RES (14)..(14): Norleucine
  C-term NH2
LTFAEYWSQAASALA

SEQ ID NO: 255 - protein, 15 aa, Artificial Sequence
  Description of Artificial Sequence: Synthetic peptide
  N-term Ac
  MOD_RES (4)..(4): Alpha-Me R8-octenyl-alanine olefin amino acid connected by an all-carbon crosslinker comprising one double bond
  misc_feature (4)..(11): Crosslink between residues
  MOD_RES (10)..(10): Cyclobutyl-Ala
  MOD_RES (11)..(11): Alpha-Me S5-pentenyl-alanine olefin amino acid connected by an all-carbon crosslinker comprising one double bond
  MOD_RES (14)..(14): Norleucine
  C-term NH2
LTFAEYWWQAASALA

SEQ ID NO: 256 - protein, 15 aa, Artificial Sequence
  Description of Artificial Sequence: Synthetic peptide
  N-term Ac
  MOD_RES (4)..(4): Alpha-Me R8-octenyl-alanine olefin amino acid connected by an all-carbon crosslinker comprising one double bond
  misc_feature (4)..(11): Crosslink between residues
  MOD_RES (10)..(10): Cyclobutyl-Ala
  MOD_RES (11)..(11): Alpha-Me S5-pentenyl-alanine olefin amino acid connected by an all-carbon crosslinker comprising one double bond
  MOD_RES (15)..(15): D-amino acid
  C-term NH2
LTFAEYWAQAAAAIA

SEQ ID NO: 257 - protein, 15 aa, Artificial Sequence
  Description of Artificial Sequence: Synthetic peptide
  N-term Ac
  MOD_RES (3)..(3): 3,4-difluoro Phe
  MOD_RES (4)..(4): Alpha-Me R8-octenyl-alanine olefin amino acid connected by an all-carbon crosslinker comprising one double bond
  misc_feature (4)..(11): Crosslink between residues
  MOD_RES (10)..(10): Cyclobutyl-Ala
  MOD_RES (11)..(11): Alpha-Me S5-pentenyl-alanine olefin amino acid connected by an all-carbon crosslinker comprising one double bond
  MOD_RES (15)..(15): D-amino acid
  C-term NH2
LTFAEYWAQAAAAIA

SEQ ID NO: 258 - protein, 15 aa, Artificial Sequence
  Description of Artificial Sequence: Synthetic peptide
  N-term Ac
  MOD_RES (4)..(4): Alpha-Me R8-octenyl-alanine olefin amino acid connected by an all-carbon crosslinker comprising one double bond
  misc_feature (4)..(11): Crosslink between residues
  MOD_RES (6)..(6): 4-carboxy Phe
  MOD_RES (10)..(10): Cyclobutyl-Ala
  MOD_RES (11)..(11): Alpha-Me S5-pentenyl-alanine olefin amino acid connected by an all-carbon crosslinker comprising one double bond
  MOD_RES (15)..(15): D-amino acid
  C-term NH2
LTFAEFWAQAAAAIA

SEQ ID NO: 259 - protein, 14 aa, Artificial Sequence
  Description of Artificial Sequence: Synthetic peptide
  N-term Pam
  MOD_RES (4)..(4): Alpha-Me R8-octenyl-alanine olefin amino acid connected by an all-carbon crosslinker comprising one double bond
  misc_feature (4)..(11): Crosslink between residues
  MOD_RES (10)..(10): Cyclobutyl-Ala
  MOD_RES (11)..(11): Alpha-Me S5-pentenyl-alanine olefin amino acid connected by an all-carbon crosslinker comprising one double bond
  C-term NH2
ETFAEYWAQAASAA

SEQ ID NO: 260 - protein, 14 aa, Artificial Sequence
  Description of Artificial Sequence: Synthetic peptide
  N-term Ac
  MOD_RES (3)..(3): homo-Phe
  MOD_RES (4)..(4): Alpha-Me R8-octenyl-alanine olefin amino acid connected by an all-carbon crosslinker comprising one double bond
  misc_feature (4)..(11): Crosslink between residues
  MOD_RES (10)..(10): Cyclobutyl-Ala
  MOD_RES (11)..(11): Alpha-Me S5-pentenyl-alanine olefin amino acid connected by an all-carbon crosslinker comprising one double bond
  C-term NH2
LTFAEFWAQAASAA

SEQ ID NO: 261 - protein, 14 aa, Artificial Sequence
  Description of Artificial Sequence: Synthetic peptide
  N-term Ac
  MOD_RES (4)..(4): Alpha-Me R8-octenyl-alanine olefin amino acid connected by an all-carbon crosslinker comprising one double bond
  misc_feature (4)..(11): Crosslink between residues
  MOD_RES (10)..(10): Cyclobutyl-Ala
  MOD_RES (11)..(11): Alpha-Me S5-pentenyl-alanine olefin amino acid connected by an all-carbon crosslinker comprising one double bond
  C-term NH2
LTAAEYWAQAASAA

SEQ ID NO: 262 - protein, 14 aa, Artificial Sequence
  Description of Artificial Sequence: Synthetic peptide
  N-term Ac
  MOD_RES (4)..(4): Alpha-Me R8-octenyl-alanine olefin amino acid connected by an all-carbon crosslinker comprising one double bond
  misc_feature (4)..(11): Crosslink between residues
  MOD_RES (10)..(10): Cyclobutyl-Ala
  MOD_RES (11)..(11): Alpha-Me S5-pentenyl-alanine olefin amino acid connected by an all-carbon crosslinker comprising one double bond
  C-term NH2
LTFAEYAAQAASAA

SEQ ID NO: 263 - protein, 14 aa, Artificial Sequence
  Description of Artificial Sequence: Synthetic peptide
  N-term Ac
  MOD_RES (4)..(4): Alpha-Me R8-octenyl-alanine olefin amino acid connected by an all-carbon crosslinker comprising one double bond
  misc_feature (4)..(11): Crosslink between residues
  MOD_RES (7)..(7): 2-Naphthalanine
  MOD_RES (10)..(10): Cyclobutyl-Ala
  MOD_RES (11)..(11): Alpha-Me S5-pentenyl-alanine olefin amino acid connected by an all-carbon crosslinker comprising one double bond
  C-term NH2
LTFAEYAAQAASAA

SEQ ID NO: 264 - protein, 14 aa, Artificial Sequence
  Description of Artificial Sequence: Synthetic peptide
  N-term Ac
  MOD_RES (4)..(4): Alpha-Me R8-octenyl-alanine olefin amino acid connected by an all-carbon crosslinker comprising one double bond
  misc_feature (4)..(11): Crosslink between residues
  MOD_RES (10)..(10): Cyclobutyl-Ala
  MOD_RES (11)..(11): Alpha-Me S5-pentenyl-alanine olefin amino acid connected by an all-carbon crosslinker comprising one double bond
  C-term NH2
LTFAAYWAQAASAA

SEQ ID NO: 265 - protein, 14 aa, Artificial Sequence
  Description of Artificial Sequence: Synthetic peptide
  N-term Ac
  MOD_RES (4)..(4): Alpha-Me R8-octenyl-alanine olefin amino acid connected by an all-carbon crosslinker comprising one double bond
  misc_feature (4)..(11): Crosslink between residues
  MOD_RES (10)..(10): Cyclobutyl-Ala
  MOD_RES (11)..(11): Alpha-Me S5-pentenyl-alanine olefin amino acid connected by an all-carbon crosslinker comprising one double bond
  C-term NH2
LTFAEYWAQAASAF

SEQ ID NO: 266 - protein, 15 aa, Artificial Sequence
  Description of Artificial Sequence: Synthetic peptide
  N-term Ac
  MOD_RES (4)..(4): Alpha-Me R8-octenyl-alanine olefin amino acid connected by an all-carbon crosslinker comprising one double bond
  misc_feature (4)..(11): Crosslink between residues
  MOD_RES (10)..(10): Cyclobutyl-Ala
  MOD_RES (11)..(11): Alpha-Me S5-pentenyl-alanine olefin amino acid connected by an all-carbon crosslinker comprising one double bond
  MOD_RES (15)..(15): D-amino acid
  C-term NH2
LTFAEYWAQAASAFA

SEQ ID NO: 267 - protein, 14 aa, Artificial Sequence
  Description of Artificial Sequence: Synthetic peptide
  N-term Ac
  MOD_RES (4)..(4): Alpha-Me R8-octenyl-alanine olefin amino acid connected by an all-carbon crosslinker comprising one double bond
  misc_feature (4)..(11): Crosslink between residues
  MOD_RES (10)..(10): Cyclobutyl-Ala
  MOD_RES (11)..(11): Alpha-Me S5-pentenyl-alanine olefin amino acid connected by an all-carbon crosslinker comprising one double bond
  C-term NH2
LTFAAYWAQAASAF

SEQ ID NO: 268 - protein, 14 aa, Artificial Sequence
  Description of Artificial Sequence: Synthetic peptide
  N-term Ac
  MOD_RES (3)..(3): 3,4-difluoro Phe
  MOD_RES (4)..(4): Alpha-Me R8-octenyl-alanine olefin amino acid connected by an all-carbon crosslinker comprising one double bond
  misc_feature (4)..(11): Crosslink between residues
  MOD_RES (10)..(10): Cyclobutyl-Ala
  MOD_RES (11)..(11): Alpha-Me S5-pentenyl-alanine olefin amino acid connected by an all-carbon crosslinker comprising one double bond
  C-term NH2
LTFAAYWAQAASAF

SEQ ID NO: 269 - protein, 14 aa, Artificial Sequence
  Description of Artificial Sequence: Synthetic peptide
  N-term Ac
  MOD_RES (4)..(4): Alpha-Me R8-octenyl-alanine olefin amino acid connected by an all-carbon crosslinker comprising one double bond
  misc_feature (4)..(11): Crosslink between residues
  MOD_RES (6)..(6): 4-carboxy Phe
  MOD_RES (10)..(10): Cyclobutyl-Ala
  MOD_RES (11)..(11): Alpha-Me S5-pentenyl-alanine olefin amino acid connected by an all-carbon crosslinker comprising one double bond
  C-term NH2
LTFAAFWAQAASAF

SEQ ID NO: 270 - protein, 14 aa, Artificial Sequence
  Description of Artificial Sequence: Synthetic peptide
  N-term Ac
  MOD_RES (4)..(4): Alpha-Me R8-octenyl-alanine olefin amino acid connected by an all-carbon crosslinker comprising one double bond
  misc_feature (4)..(11): Crosslink between residues
  MOD_RES (7)..(7): 6cl-Trp
  MOD_RES (10)..(10): Cyclobutyl-Ala
  MOD_RES (11)..(11): Alpha-Me S5-pentenyl-alanine olefin amino acid connected by an all-carbon crosslinker comprising one double bond
  C-term NH2
LTFAEYWAQAASAF

SEQ ID NO: 271 - protein, 14 aa, Artificial Sequence
  Description of Artificial Sequence: Synthetic peptide
  N-term Ac
  MOD_RES (4)..(4): Alpha-Me R8-octenyl-alanine olefin amino acid connected by an all-carbon crosslinker comprising one double bond
  misc_feature (4)..(11): Crosslink between residues
  MOD_RES (10)..(10): Cyclobutyl-Ala
  MOD_RES (11)..(11): Alpha-Me S5-pentenyl-alanine olefin amino acid connected by an all-carbon crosslinker comprising one double bond
  C-term NH2
LTFAAYWSQAASAF

SEQ ID NO: 272 - protein, 14 aa, Artificial Sequence
  Description of Artificial Sequence: Synthetic peptide
  N-term Ac
  MOD_RES (4)..(4): Alpha-Me R8-octenyl-alanine olefin amino acid connected by an all-carbon crosslinker comprising one double bond
  misc_feature (4)..(11): Crosslink between residues
  MOD_RES (10)..(10): Cyclobutyl-Ala
  MOD_RES (11)..(11): Alpha-Me S5-pentenyl-alanine olefin amino acid connected by an all-carbon crosslinker comprising one double bond
  C-term NH2
LTFAAYWWQAASAF

SEQ ID NO: 273 - protein, 15 aa, Artificial Sequence
  Description of Artificial Sequence: Synthetic peptide
  N-term Ac
  MOD_RES (4)..(4): Alpha-Me R8-octenyl-alanine olefin amino acid connected by an all-carbon crosslinker comprising one double bond
  misc_feature (4)..(11): Crosslink between residues
  MOD_RES (10)..(10): Cyclobutyl-Ala
  MOD_RES (11)..(11): Alpha-Me S5-pentenyl-alanine olefin amino acid connected by an all-carbon crosslinker comprising one double bond
  MOD_RES (15)..(15): D-amino acid
  C-term NH2
LTFAAYWAQAAAAIA

SEQ ID NO: 274 - protein, 15 aa, Artificial Sequence
  Description of Artificial Sequence: Synthetic peptide
  N-term Ac
  MOD_RES (3)..(3): 3,4-difluoro Phe
  MOD_RES (4)..(4): Alpha-Me R8-octenyl-alanine olefin amino acid connected by an all-carbon crosslinker comprising one double bond
  misc_feature (4)..(11): Crosslink between residues
  MOD_RES (10)..(10): Cyclobutyl-Ala
  MOD_RES (11)..(11): Alpha-Me S5-pentenyl-alanine olefin amino acid connected by an all-carbon crosslinker comprising one double bond
  MOD_RES (15)..(15): D-amino acid
  C-term NH2
LTFAAYWAQAAAAIA

SEQ ID NO: 275 - protein, 15 aa, Artificial Sequence
  Description of Artificial Sequence: Synthetic peptide
  N-term Ac
  MOD_RES (4)..(4): Alpha-Me R8-octenyl-alanine olefin amino acid connected by an all-carbon crosslinker comprising one double bond
  misc_feature (4)..(11): Crosslink between residues
  MOD_RES (7)..(7): 6cl-Trp
  MOD_RES (10)..(10): Cyclobutyl-Ala
  MOD_RES (11)..(11): Alpha-Me S5-pentenyl-alanine olefin amino acid connected by an all-carbon crosslinker comprising one double bond
  MOD_RES (15)..(15): D-amino acid
  C-term NH2
LTFAAYWAQAAAAIA

SEQ ID NO: 276 - protein, 15 aa, Artificial Sequence
  Description of Artificial Sequence: Synthetic peptide
  N-term Ac
  MOD_RES (4)..(4): Alpha-Me R8-octenyl-alanine olefin amino acid connected by an all-carbon crosslinker comprising one double bond
  misc_feature (4)..(11): Crosslink between residues
  MOD_RES (6)..(6): 4-carboxy Phe
  MOD_RES (10)..(10): Cyclobutyl-Ala
  MOD_RES (11)..(11): Alpha-Me S5-pentenyl-alanine olefin amino acid connected by an all-carbon crosslinker comprising one double bond
  MOD_RES (15)..(15): D-amino acid
  C-term NH2
LTFAAFWAQAAAAIA

SEQ ID NO: 277 - protein, 15 aa, Artificial Sequence
  Description of Artificial Sequence: Synthetic peptide
  N-term Ac
  MOD_RES (4)..(4): Alpha-Me R8-octenyl-alanine olefin amino acid connected by an all-carbon crosslinker comprising one double bond
  misc_feature (4)..(11): Crosslink between residues
  MOD_RES (10)..(10): Cyclobutyl-Ala
  MOD_RES (11)..(11): Alpha-Me S5-pentenyl-alanine olefin amino acid connected by an all-carbon crosslinker comprising one double bond
  MOD_RES (15)..(15): D-amino acid
  C-term NH2
LTFAEYWAQAAAAFA

SEQ ID NO: 278 - protein, 15 aa, Artificial Sequence
  Description of Artificial Sequence: Synthetic peptide
  N-term Ac
  MOD_RES (4)..(4): Alpha-Me R8-octenyl-alanine olefin amino acid connected by an all-carbon crosslinker comprising one double bond
  misc_feature (4)..(11): Crosslink between residues
  MOD_RES (10)..(10): Cyclobutyl-Ala
  MOD_RES (11)..(11): Alpha-Me S5-pentenyl-alanine olefin amino acid connected by an all-carbon crosslinker comprising one double bond
  MOD_RES (15)..(15): D-amino acid
  C-term NH2
LTFAEYWAQAAAAFA

SEQ ID NO: 279 - protein, 15 aa, Artificial Sequence
  Description of Artificial Sequence: Synthetic peptide
  N-term Ac
  MOD_RES (4)..(4): Alpha-Me R8-octenyl-alanine olefin amino acid connected by an all-carbon crosslinker comprising one double bond
  misc_feature (4)..(11): Crosslink between residues
  MOD_RES (10)..(10): Cyclobutyl-Ala
  MOD_RES (11)..(11): Alpha-Me S5-pentenyl-alanine olefin amino acid connected by an all-carbon crosslinker comprising one double bond
  MOD_RES (14)..(14): Norleucine
  MOD_RES (15)..(15): D-amino acid
  C-term NH2
ETFAAYWAQAAAWLA

SEQ ID NO: 280 - protein, 15 aa, Artificial Sequence
  Description of Artificial Sequence: Synthetic peptide
  N-term Ac
  MOD_RES (4)..(4): Alpha-Me R8-octenyl-alanine olefin amino acid connected by an all-carbon crosslinker comprising one double bond
  misc_feature (4)..(11): Crosslink between residues
  MOD_RES (10)..(10): Cyclobutyl-Ala
  MOD_RES (11)..(11): Alpha-Me S5-pentenyl-alanine olefin amino acid connected by an all-carbon crosslinker comprising one double bond
  MOD_RES (14)..(14): Norleucine
  MOD_RES (15)..(15): D-amino acid
  C-term NH2
LTFAEYWAQAAAWLA

SEQ ID NO: 281 - protein, 15 aa, Artificial Sequence
  Description of Artificial Sequence: Synthetic peptide
  N-term Ac
  MOD_RES (4)..(4): Alpha-Me R8-octenyl-alanine olefin amino acid connected by an all-carbon crosslinker comprising one double bond
  misc_feature (4)..(11): Crosslink between residues
  MOD_RES (10)..(10): Cyclobutyl-Ala
  MOD_RES (11)..(11): Alpha-Me S5-pentenyl-alanine olefin amino acid connected by an all-carbon crosslinker comprising one double bond
  MOD_RES (14)..(14): Norleucine
  MOD_RES (15)..(15): D-amino acid
  C-term NH2
ETFAEYWAQAAAWLA

SEQ ID NO: 282 - protein, 15 aa, Artificial Sequence
  Description of Artificial Sequence: Synthetic peptide
  N-term Ac
  MOD_RES (4)..(4): Alpha-Me R8-octenyl-alanine olefin amino acid connected by an all-carbon crosslinker comprising one double bond
  misc_feature (4)..(11): Crosslink between residues
  MOD_RES (10)..(10): Cyclobutyl-Ala
  MOD_RES (11)..(11): Alpha-Me S5-pentenyl-alanine olefin amino acid connected by an all-carbon crosslinker comprising one double bond
  MOD_RES (14)..(14): Norleucine
  MOD_RES (15)..(15): D-amino acid
  C-term NH2
ETFAEYWAQAAAWLA

SEQ ID NO: 283 - protein, 15 aa, Artificial Sequence
  Description of Artificial Sequence: Synthetic peptide
  N-term Ac
  MOD_RES (4)..(4): Alpha-Me R8-octenyl-alanine olefin amino acid connected by an all-carbon crosslinker comprising one double bond
  misc_feature (4)..(11): Crosslink between residues
  MOD_RES (10)..(10): Cyclobutyl-Ala
  MOD_RES (11)..(11): Alpha-Me S5-pentenyl-alanine olefin amino acid connected by an all-carbon crosslinker comprising one double bond
  MOD_RES (15)..(15): D-amino acid
  C-term NH2
LTFAAYWAQAASAFA

SEQ ID NO: 284 - protein, 15 aa, Artificial Sequence
  Description of Artificial Sequence: Synthetic peptide
  N-term Ac
  MOD_RES (4)..(4): Alpha-Me R8-octenyl-alanine olefin amino acid connected by an all-carbon crosslinker comprising one double bond
  misc_feature (4)..(11): Crosslink between residues
  MOD_RES (10)..(10): Cyclobutyl-Ala
  MOD_RES (11)..(11): Alpha-Me S5-pentenyl-alanine olefin amino acid connected by an all-carbon crosslinker comprising one double bond
  MOD_RES (15)..(15): D-amino acid
  C-term NH2
LTFAAYWAQAASAFA

SEQ ID NO: 285 - protein, 15 aa, Artificial Sequence
  Description of Artificial Sequence: Synthetic peptide
  N-term Ac
  MOD_RES (4)..(4): Alpha-Me R8-octenyl-alanine olefin amino acid connected by an all-carbon crosslinker comprising one double bond
  misc_feature (4)..(11): Crosslink between residues
  MOD_RES (11)..(11): Alpha-Me S5-pentenyl-alanine olefin amino acid connected by an all-carbon crosslinker comprising one double bond
  MOD_RES (14)..(14): Norleucine
  MOD_RES (15)..(15): D-amino acid
  C-term NH2
ETFAAYWAQLAAWLA

SEQ ID NO: 286 - protein, 15 aa, Artificial Sequence
  Description of Artificial Sequence: Synthetic peptide
  N-term Ac
  MOD_RES (4)..(4): Alpha-Me R8-octenyl-alanine olefin amino acid connected by an all-carbon crosslinker comprising one double bond
  misc_feature (4)..(11): Crosslink between residues
  MOD_RES (11)..(11): Alpha-Me S5-pentenyl-alanine olefin amino acid connected by an all-carbon crosslinker comprising one double bond
  MOD_RES (14)..(14): Norleucine
  MOD_RES (15)..(15): D-amino acid
  C-term NH2
LTFAEYWAQLAAWLA

SEQ ID NO: 287 - protein, 15 aa, Artificial Sequence
  Description of Artificial Sequence: Synthetic peptide
  N-term Ac
  MOD_RES (4)..(4): Alpha-Me R8-octenyl-alanine olefin amino acid connected by an all-carbon crosslinker comprising one double bond
  misc_feature (4)..(11): Crosslink between residues
  MOD_RES (11)..(11): Alpha-Me S5-pentenyl-alanine olefin amino acid connected by an all-carbon crosslinker comprising one double bond
  MOD_RES (14)..(14): Norleucine
  MOD_RES (15)..(15): D-amino acid
  C-term NH2
ETFAEYWAQLAAWLA

SEQ ID NO: 288 - protein, 14 aa, Artificial Sequence
  Description of Artificial Sequence: Synthetic peptide
  N-term Dmaac
  MOD_RES (4)..(4): Alpha-Me R8-octenyl-alanine olefin amino acid connected by an all-carbon crosslinker comprising one double bond
  misc_feature (4)..(11): Crosslink between residues
  MOD_RES (10)..(10): hLeu
  MOD_RES (11)..(11): Alpha-Me S5-pentenyl-alanine olefin amino acid connected by an all-carbon crosslinker comprising one double bond
  C-term NH2
LTFAEYWAQLASAA

SEQ ID NO: 289 - protein, 14 aa, Artificial Sequence
  Description of Artificial Sequence: Synthetic peptide
  N-term Hexac
  MOD_RES (4)..(4): Alpha-Me R8-octenyl-alanine olefin amino acid connected by an all-carbon crosslinker comprising one double bond
  misc_feature (4)..(11): Crosslink between residues
  MOD_RES (10)..(10): hLeu
  MOD_RES (11)..(11): Alpha-Me S5-pentenyl-alanine olefin amino acid connected by an all-carbon crosslinker comprising one double bond
  C-term NH2
LTFAEYWAQLASAA

SEQ ID NO: 290 - protein, 14 aa, Artificial Sequence
  Description of Artificial Sequence: Synthetic peptide
  N-term Napac
  MOD_RES (4)..(4): Alpha-Me R8-octenyl-alanine olefin amino acid connected by an all-carbon crosslinker comprising one double bond
  misc_feature (4)..(11): Crosslink between residues
  MOD_RES (10)..(10): hLeu
  MOD_RES (11)..(11): Alpha-Me S5-pentenyl-alanine olefin amino acid connected by an all-carbon crosslinker comprising one double bond
  C-term NH2
LTFAEYWAQLASAA

SEQ ID NO: 291 - protein, 14 aa, Artificial Sequence
  Description of Artificial Sequence: Synthetic peptide
  N-term Decac
  MOD_RES (4)..(4): Alpha-Me R8-octenyl-alanine olefin amino acid connected by an all-carbon crosslinker comprising one double bond
  misc_feature (4)..(11): Crosslink between residues
  MOD_RES (10)..(10): hLeu
  MOD_RES (11)..(11): Alpha-Me S5-pentenyl-alanine olefin amino acid connected by an all-carbon crosslinker comprising one double bond
  C-term NH2
LTFAEYWAQLASAA

SEQ ID NO: 292 - protein, 14 aa, Artificial Sequence
  Description of Artificial Sequence: Synthetic peptide
  N-term Admac
  MOD_RES (4)..(4): Alpha-Me R8-octenyl-alanine olefin amino acid connected by an all-carbon crosslinker comprising one double bond
  misc_feature (4)..(11): Crosslink between residues
  MOD_RES (10)..(10): hLeu
  MOD_RES (11)..(11): Alpha-Me S5-pentenyl-alanine olefin amino acid connected by an all-carbon crosslinker comprising one double bond
  C-term NH2
LTFAEYWAQLASAA

SEQ ID NO: 293 - protein, 14 aa, Artificial Sequence
  Description of Artificial Sequence: Synthetic peptide
  N-term Tmac
  MOD_RES (4)..(4): Alpha-Me R8-octenyl-alanine olefin amino acid connected by an all-carbon crosslinker comprising one double bond
  misc_feature (4)..(11): Crosslink between residues
  MOD_RES (10)..(10): hLeu
  MOD_RES (11)..(11): Alpha-Me S5-pentenyl-alanine olefin amino acid connected by an all-carbon crosslinker comprising one double bond
  C-term NH2
LTFAEYWAQLASAA

SEQ ID NO: 294 - protein, 14 aa, Artificial Sequence
  Description of Artificial Sequence: Synthetic peptide
  N-term Pam
  MOD_RES (4)..(4): Alpha-Me R8-octenyl-alanine olefin amino acid connected by an all-carbon crosslinker comprising one double bond
  misc_feature (4)..(11): Crosslink between residues
  MOD_RES (10)..(10): hLeu
  MOD_RES (11)..(11): Alpha-Me S5-pentenyl-alanine olefin amino acid connected by an all-carbon crosslinker comprising one double bond
  C-term NH2
LTFAEYWAQLASAA

SEQ ID NO: 295 - protein, 15 aa, Artificial Sequence
  Description of Artificial Sequence: Synthetic peptide
  N-term Ac
  MOD_RES (4)..(4): Alpha-Me R8-octenyl-alanine olefin amino acid connected by an all-carbon crosslinker comprising one double bond
  misc_feature (4)..(11): Crosslink between residues
  MOD_RES (10)..(10): Cyclobutyl-Ala
  MOD_RES (11)..(11): Alpha-Me S5-pentenyl-alanine olefin amino acid connected by an all-carbon crosslinker comprising one double bond
  MOD_RES (14)..(14): Norleucine
  C-term NH2
LTFAAYWAQAAAALA

SEQ ID NO: 296 - protein, 15 aa, Artificial Sequence
  Description of Artificial Sequence: Synthetic peptide
  N-term Ac
  MOD_RES (3)..(3): 3,4-difluoro Phe
  MOD_RES (4)..(4): Alpha-Me R8-octenyl-alanine olefin amino acid connected by an all-carbon crosslinker comprising one double bond
  misc_feature (4)..(11): Crosslink between residues
  MOD_RES (10)..(10): Cyclobutyl-Ala
  MOD_RES (11)..(11): Alpha-Me S5-pentenyl-alanine olefin amino acid connected by an all-carbon crosslinker comprising one double bond
  MOD_RES (15)..(15): D-amino acid
  C-term NH2
LTFAEYWAQAAAAIA

SEQ ID NO: 297 - protein, 14 aa, Artificial Sequence
  Description of Artificial Sequence: Synthetic peptide
  N-term Ac
  MOD_RES (3)..(3): 3,4-difluoro Phe
  MOD_RES (4)..(4): Alpha-Me R8-octenyl-alanine olefin amino acid connected by an all-carbon crosslinker comprising one double bond
  misc_feature (4)..(11): Crosslink between residues
  MOD_RES (10)..(10): Cyclobutyl-Ala
  MOD_RES (11)..(11): Alpha-Me S5-pentenyl-alanine olefin amino acid connected by an all-carbon crosslinker comprising one double bond
  C-term NH2
LTFAEYWAQAASAA

SEQ ID NO: 298 - protein, 14 aa, Artificial Sequence
  Description of Artificial Sequence: Synthetic peptide
  N-term Ac
  MOD_RES (3)..(3): 3,4-difluoro Phe
  MOD_RES (4)..(4): Alpha-Me R8-octenyl-alanine olefin amino acid connected by an all-carbon crosslinker comprising one double bond
  misc_feature (4)..(11): Crosslink between residues
  MOD_RES (10)..(10): Cyclobutyl-Ala
  MOD_RES (11)..(11): Alpha-Me S5-pentenyl-alanine olefin amino acid connected by an all-carbon crosslinker comprising one double bond
  C-term NH2
LTFAEYWAQAASAA

SEQ ID NO: 299 - protein, 14 aa, Artificial Sequence
  Description of Artificial Sequence: Synthetic peptide
  N-term Ac
  MOD_RES (4)..(4): Alpha-Me R8-octenyl-alanine olefin amino acid connected by an all-carbon crosslinker comprising one double bond
  misc_feature (4)..(11): Crosslink between residues
  MOD_RES (6)..(6): 4-carboxy Phe
  MOD_RES (10)..(10): Cyclobutyl-Ala
  MOD_RES (11)..(11): Alpha-Me S5-pentenyl-alanine olefin amino acid connected by an all-carbon crosslinker comprising one double bond
  C-term NH2
LTFAEFWAQAASAA

SEQ ID NO: 300 - protein, 14 aa, Artificial Sequence
  Description of Artificial Sequence: Synthetic peptide
  N-term Ac
  MOD_RES (4)..(4): Alpha-Me R8-octenyl-alanine olefin amino acid connected by an all-carbon crosslinker comprising one double bond
  misc_feature (4)..(11): Crosslink between residues
  MOD_RES (6)..(6): 4-carboxy Phe
  MOD_RES (10)..(10): Cyclobutyl-Ala
  MOD_RES (11)..(11): Alpha-Me S5-pentenyl-alanine olefin amino acid connected by an all-carbon crosslinker comprising one double bond
  C-term NH2
LTFAEFWAQAASAA

SEQ ID NO: 301 - protein, 14 aa, Artificial Sequence
  Description of Artificial Sequence: Synthetic peptide
  N-term Ac
  MOD_RES (4)..(4): Alpha-Me R8-octenyl-alanine olefin amino acid connected by an all-carbon crosslinker comprising one double bond
  misc_feature (4)..(11): Crosslink between residues
  MOD_RES (10)..(10): Cyclobutyl-Ala
  MOD_RES (11)..(11): Alpha-Me S5-pentenyl-alanine olefin amino acid connected by an all-carbon crosslinker comprising one double bond
  C-term NH2
LTFAEYWSQAASAA

SEQ ID NO: 302 - protein, 14 aa, Artificial Sequence
  Description of Artificial Sequence: Synthetic peptide
  N-term Ac
  MOD_RES (4)..(4): Alpha-Me R8-octenyl-alanine olefin amino acid connected by an all-carbon crosslinker comprising one double bond
  misc_feature (4)..(11): Crosslink between residues
  MOD_RES (10)..(10): Cyclobutyl-Ala
  MOD_RES (11)..(11): Alpha-Me S5-pentenyl-alanine olefin amino acid connected by an all-carbon crosslinker comprising one double bond
  C-term NH2
LTFAEYWSQAASAA

SEQ ID NO: 303 - protein, 14 aa, Artificial Sequence
  Description of Artificial Sequence: Synthetic peptide
  N-term Ac
  MOD_RES (4)..(4): Alpha-Me R8-octenyl-alanine olefin amino acid connected by an all-carbon crosslinker comprising one double bond
  misc_feature (4)..(11): Crosslink between residues
  MOD_RES (10)..(10): hLeu
  MOD_RES (11)..(11): Alpha-Me S5-pentenyl-alanine olefin amino acid connected by an all-carbon crosslinker comprising one double bond
  C-term NH2
LTFAEYWAQLASAA

SEQ ID NO: 304 - protein, 14 aa, Artificial Sequence
  Description of Artificial Sequence: Synthetic peptide
  N-term Ac
  MOD_RES (4)..(4): Alpha-Me R8-octenyl-alanine olefin amino acid connected by an all-carbon crosslinker comprising one double bond
  misc_feature (4)..(11): Crosslink between residues
  MOD_RES (10)..(10): hLeu
  MOD_RES (11)..(11): Alpha-Me S5-pentenyl-alanine olefin amino acid connected by an all-carbon crosslinker comprising one double bond
  C-term NH2
LTFAAYWAQLASAF

SEQ ID NO: 305 - protein, 14 aa, Artificial Sequence
  Description of Artificial Sequence: Synthetic peptide
  N-term Ac
  MOD_RES (4)..(4): Alpha-Me R8-octenyl-alanine olefin amino acid connected by an all-carbon crosslinker comprising one double bond
  misc_feature (4)..(11): Crosslink between residues
  MOD_RES (10)..(10): hLeu
  MOD_RES (11)..(11): Alpha-Me S5-pentenyl-alanine olefin amino acid connected by an all-carbon crosslinker comprising one double bond
  C-term NH2
LTFAAYWAQLASAF

SEQ ID NO: 306 - protein, 14 aa, Artificial Sequence
  Description of Artificial Sequence: Synthetic peptide
  N-term Ac
  MOD_RES (3)..(3): 3,4-difluoro Phe
  MOD_RES (4)..(4): Alpha-Me R8-octenyl-alanine olefin amino acid connected by an all-carbon crosslinker comprising one double bond
  misc_feature (4)..(11): Crosslink between residues
  MOD_RES (10)..(10): hLeu
  MOD_RES (11)..(11): Alpha-Me S5-pentenyl-alanine olefin amino acid connected by an all-carbon crosslinker comprising one double bond
  C-term NH2
LTFAAYWAQLASAA

SEQ ID NO: 307 - protein, 14 aa, Artificial Sequence
  Description of Artificial Sequence: Synthetic peptide
  N-term Ac
  MOD_RES (3)..(3): 3,4-difluoro Phe
  MOD_RES (4)..(4): Alpha-Me R8-octenyl-alanine olefin amino acid connected by an all-carbon crosslinker comprising one double bond
  misc_feature (4)..(11): Crosslink between residues
  MOD_RES (10)..(10): hLeu
  MOD_RES (11)..(11): Alpha-Me S5-pentenyl-alanine olefin amino acid connected by an all-carbon crosslinker comprising one double bond
  C-term NH2
LTFAAYWAQLASAA

SEQ ID NO: 308 - protein, 14 aa, Artificial Sequence
  Description of Artificial Sequence: Synthetic peptide
  N-term Ac
  MOD_RES (4)..(4): Alpha-Me R8-octenyl-alanine olefin amino acid connected by an all-carbon crosslinker comprising one double bond
  misc_feature (4)..(11): Crosslink between residues
  MOD_RES (6)..(6): 4-carboxy Phe
  MOD_RES (10)..(10): hLeu
  MOD_RES (11)..(11): Alpha-Me S5-pentenyl-alanine olefin amino acid connected by an all-carbon crosslinker comprising one double bond
  C-term NH2
LTFAAFWAQLASAA

SEQ ID NO: 309 - protein, 14 aa, Artificial Sequence
  Description of Artificial Sequence: Synthetic peptide
  N-term Ac
  MOD_RES (4)..(4): Alpha-Me R8-octenyl-alanine olefin amino acid connected by an all-carbon crosslinker comprising one double bond
  misc_feature (4)..(11): Crosslink between residues
  MOD_RES (6)..(6): 4-carboxy Phe
  MOD_RES (10)..(10): hLeu
  MOD_RES (11)..(11): Alpha-Me S5-pentenyl-alanine olefin amino acid connected by an all-carbon crosslinker comprising one double bond
  C-term NH2
LTFAAFWAQLASAA

SEQ ID NO: 310 - protein, 14 aa, Artificial Sequence
  Description of Artificial Sequence: Synthetic peptide
  N-term Ac
  MOD_RES (4)..(4): Alpha-Me R8-octenyl-alanine olefin amino acid connected by an all-carbon crosslinker comprising one double bond
  misc_feature (4)..(11): Crosslink between residues
  MOD_RES (10)..(10): hLeu
  MOD_RES (11)..(11): Alpha-Me S5-pentenyl-alanine olefin amino acid connected by an all-carbon crosslinker comprising one double bond
  C-term NH2
LTFAAYWSQLASAA

SEQ ID NO: 311 - protein, 14 aa, Artificial Sequence
  Description of Artificial Sequence: Synthetic peptide
  N-term Ac
  MOD_RES (4)..(4): Alpha-Me R8-octenyl-alanine olefin amino acid connected by an all-carbon crosslinker comprising one double bond
  misc_feature (4)..(11): Crosslink between residues
  MOD_RES (10)..(10): hLeu
  MOD_RES (11)..(11): Alpha-Me S5-pentenyl-alanine olefin amino acid connected by an all-carbon crosslinker comprising one double bond
  C-term NH2
LTFAAYWSQLASAA

SEQ ID NO: 312 - protein, 15 aa, Artificial Sequence
  Description of Artificial Sequence: Synthetic peptide
  N-term Ac
  MOD_RES (4)..(4): Alpha-Me R8-octenyl-alanine olefin amino acid connected by an all-carbon crosslinker comprising one double bond
  misc_feature (4)..(11): Crosslink between residues
  MOD_RES (11)..(11): Alpha-Me S5-pentenyl-alanine olefin amino acid connected by an all-carbon crosslinker comprising one double bond
  MOD_RES (14)..(14): Norleucine
  C-term NH2
LTFAEYWAQLAAALA

SEQ ID NO: 313 - protein, 15 aa, Artificial Sequence
  Description of Artificial Sequence: Synthetic peptide
  N-term Ac
  MOD_RES (3)..(3): 3,4-difluoro Phe
  MOD_RES (4)..(4): Alpha-Me R8-octenyl-alanine olefin amino acid connected by an all-carbon crosslinker comprising one double bond
  misc_feature (4)..(11): Crosslink between residues
  MOD_RES (11)..(11): Alpha-Me S5-pentenyl-alanine olefin amino acid connected by an all-carbon crosslinker comprising one double bond
  MOD_RES (14)..(14): Norleucine
  C-term NH2
LTFAAYWAQLAAALA

SEQ ID NO: 314 - protein, 15 aa, Artificial Sequence
  Description of Artificial Sequence: Synthetic peptide
  N-term Ac
  MOD_RES (4)..(4): Alpha-Me R8-octenyl-alanine olefin amino acid connected by an all-carbon crosslinker comprising one double bond
  misc_feature (4)..(11): Crosslink between residues
  MOD_RES (6)..(6): 4-carboxy Phe
  MOD_RES (11)..(11): Alpha-Me S5-pentenyl-alanine olefin amino acid connected by an all-carbon crosslinker comprising one double bond
  MOD_RES (14)..(14): Norleucine
  C-term NH2
LTFAAFWAQLAAALA

SEQ ID NO: 315 - protein, 15 aa, Artificial Sequence
  Description of Artificial Sequence: Synthetic peptide
  N-term Ac
  MOD_RES (4)..(4): Alpha-Me R8-octenyl-alanine olefin amino acid connected by an all-carbon crosslinker comprising one double bond
  misc_feature (4)..(11): Crosslink between residues
  MOD_RES (11)..(11): Alpha-Me S5-pentenyl-alanine olefin amino acid connected by an all-carbon crosslinker comprising one double bond
  MOD_RES (14)..(14): Norleucine
  C-term NH2
LTFAAYWSQLAAALA

SEQ ID NO: 316 - protein, 15 aa, Artificial Sequence
  Description of Artificial Sequence: Synthetic peptide
  N-term Ac
  MOD_RES (3)..(3): 3,4-difluoro Phe
  MOD_RES (4)..(4): Alpha-Me R8-octenyl-alanine olefin amino acid connected by an all-carbon crosslinker comprising one double bond
  misc_feature (4)..(11): Crosslink between residues
  MOD_RES (10)..(10): hLeu
  MOD_RES (11)..(11): Alpha-Me S5-pentenyl-alanine olefin amino acid connected by an all-carbon crosslinker comprising one double bond
  MOD_RES (14)..(14): Norleucine
  C-term NH2
LTFAAYWAQLAAALA

SEQ ID NO: 317 - protein, 15 aa, Artificial Sequence
  Description of Artificial Sequence: Synthetic peptide
  N-term Ac
  MOD_RES (3)..(3): 3,4-difluoro Phe
  MOD_RES (4)..(4): Alpha-Me R8-octenyl-alanine olefin amino acid connected by an all-carbon crosslinker comprising one double bond
  misc_feature (4)..(11): Crosslink between residues
  MOD_RES (10)..(10): hLeu
  MOD_RES (11)..(11): Alpha-Me S5-pentenyl-alanine olefin amino acid connected by an all-carbon crosslinker comprising one double bond
  MOD_RES (14)..(14): Norleucine
  C-term NH2
LTFAAYWAQLAAALA

SEQ ID NO: 318 - protein, 15 aa, Artificial Sequence
  Description of Artificial Sequence: Synthetic peptide
  N-term Ac
  MOD_RES (4)..(4): Alpha-Me R8-octenyl-alanine olefin amino acid connected by an all-carbon crosslinker comprising one double bond
  misc_feature (4)..(11): Crosslink between residues
  MOD_RES (6)..(6): 4-carboxy Phe
  MOD_RES (10)..(10): hLeu
  MOD_RES (11)..(11): Alpha-Me S5-pentenyl-alanine olefin amino acid connected by an all-carbon crosslinker comprising one double bond
  MOD_RES (14)..(14): Norleucine
  C-term NH2
LTFAAFWAQLAAALA

SEQ ID NO: 319 - protein, 15 aa, Artificial Sequence
  Description of Artificial Sequence: Synthetic peptide
  N-term Ac
  MOD_RES (4)..(4): Alpha-Me R8-octenyl-alanine olefin amino acid connected by an all-carbon crosslinker comprising one double bond
  misc_feature (4)..(11): Crosslink between residues
  MOD_RES (6)..(6): 4-carboxy Phe
  MOD_RES (10)..(10): hLeu
  MOD_RES (11)..(11): Alpha-Me S5-pentenyl-alanine olefin amino acid connected by an all-carbon crosslinker comprising one double bond
  MOD_RES (14)..(14): Norleucine
  C-term NH2
LTFAAFWAQLAAALA

SEQ ID NO: 320 - protein, 15 aa, Artificial Sequence
  Description of Artificial Sequence: Synthetic peptide
  N-term Ac
  MOD_RES (4)..(4): Alpha-Me R8-octenyl-alanine olefin amino acid connected by an all-carbon crosslinker comprising one double bond
  misc_feature (4)..(11): Crosslink between residues
  MOD_RES (10)..(10): hLeu
  MOD_RES (11)..(11): Alpha-Me S5-pentenyl-alanine olefin amino acid connected by an all-carbon crosslinker comprising one double bond
  MOD_RES (14)..(14): Norleucine
  C-term NH2
LTFAAYWSQLAAALA

SEQ ID NO: 321 - protein, 15 aa, Artificial Sequence
  Description of Artificial Sequence: Synthetic peptide
  N-term Ac
  MOD_RES (4)..(4): Alpha-Me R8-octenyl-alanine olefin amino acid connected by an all-carbon crosslinker comprising one double bond
  misc_feature (4)..(11): Crosslink between residues
  MOD_RES (10)..(10): hLeu
  MOD_RES (11)..(11): Alpha-Me S5-pentenyl-alanine olefin amino acid connected by an all-carbon crosslinker comprising one double bond
  MOD_RES (14)..(14): Norleucine
  C-term NH2
LTFAAYWSQLAAALA

SEQ ID NO: 322 - protein, 16 aa, Artificial Sequence
  Description of Artificial Sequence: Synthetic peptide
  N-term Ac
  MOD_RES (4)..(4): Alpha-Me R8-octenyl-alanine olefin amino acid connected by an all-carbon crosslinker comprising one double bond
  misc_feature (4)..(11): Crosslink between residues
  MOD_RES (10)..(10): hLeu
  MOD_RES (11)..(11): Alpha-Me S5-pentenyl-alanine olefin amino acid connected by an all-carbon crosslinker comprising one double bond
  MOD_RES (16)..(16): D-amino acid
  C-term NH2
LTFAAYWAQLAAAAAA

SEQ ID NO: 323 - protein, 16 aa, Artificial Sequence
  Description of Artificial Sequence: Synthetic peptide
  N-term Ac
  MOD_RES (4)..(4): Alpha-Me R8-octenyl-alanine olefin amino acid connected by an all-carbon crosslinker comprising one double bond
  misc_feature (4)..(11): Crosslink between residues
  MOD_RES (10)..(10): hLeu
  MOD_RES (11)..(11): Alpha-Me S5-pentenyl-alanine olefin amino acid connected by an all-carbon crosslinker comprising one double bond
  MOD_RES (16)..(16): D-amino acid
  C-term NH2
LTFAAYWAQLAAAAAA

SEQ ID NO: 324 - protein, 17 aa, Artificial Sequence
  Description of Artificial Sequence: Synthetic peptide
  N-term Ac
  MOD_RES (4)..(4): Alpha-Me R8-octenyl-alanine olefin amino acid connected by an all-carbon crosslinker comprising one double bond
  misc_feature (4)..(11): Crosslink between residues
  MOD_RES (11)..(11): Alpha-Me S5-pentenyl-alanine olefin amino acid connected by an all-carbon crosslinker comprising one double bond
  MOD_RES (17)..(17): D-amino acid
  C-term NH2
LTFAAYWAQLAAAAAAA

SEQ ID NO: 325 - protein, 18 aa, Artificial Sequence
  Description of Artificial Sequence: Synthetic peptide
  N-term Ac
  MOD_RES (4)..(4): Alpha-Me R8-octenyl-alanine olefin amino acid connected by an all-carbon crosslinker comprising one double bond
  misc_feature (4)..(11): Crosslink between residues
  MOD_RES (11)..(11): Alpha-Me S5-pentenyl-alanine olefin amino acid connected by an all-carbon crosslinker comprising one double bond
  MOD_RES (18)..(18): D-amino acid
  C-term NH2
LTFAAYWAQLAAAAAAAA

SEQ ID NO: 326 - protein, 18 aa, Artificial Sequence
  Description of Artificial Sequence: Synthetic peptide
  N-term Ac
  MOD_RES (4)..(4): Alpha-Me R8-octenyl-alanine olefin amino acid connected by an all-carbon crosslinker comprising one double bond
  misc_feature (4)..(11): Crosslink between residues
  MOD_RES (11)..(11): Alpha-Me S5-pentenyl-alanine olefin amino acid connected by an all-carbon crosslinker comprising one double bond
  MOD_RES (18)..(18): D-amino acid
  C-term NH2
LTFAAYWAQLAAAAAAAA

SEQ ID NO: 327 - protein, 15 aa, Artificial Sequence
  Description of Artificial Sequence: Synthetic peptide
  N-term Ac
  MOD_RES (4)..(4): Alpha-Me R8-octenyl-alanine olefin amino acid connected by an all-carbon crosslinker comprising one double bond
  misc_feature (4)..(11): Crosslink between residues
  MOD_RES (10)..(10): hLeu
  MOD_RES (11)..(11): Alpha-Me S5-pentenyl-alanine olefin amino acid connected by an all-carbon crosslinker comprising one double bond
  MOD_RES (14)..(14): Norleucine
  C-term NH2
LTFAEYWAQLAAALA

SEQ ID NO: 328 - protein, 16 aa, Artificial Sequence
  Description of Artificial Sequence: Synthetic peptide
  N-term Ac
  MOD_RES (5)..(5): Alpha-Me R8-octenyl-alanine olefin amino acid connected by an all-carbon crosslinker comprising one double bond
  misc_feature (5)..(12): Crosslink between residues
  MOD_RES (12)..(12): Alpha-Me S5-pentenyl-alanine olefin amino acid connected by an all-carbon crosslinker comprising one double bond
  MOD_RES (15)..(15): Norleucine
  C-term NH2
AATFAAYWAQLAAALA

SEQ ID NO: 329 - protein, 16 aa, Artificial Sequence
  Description of Artificial Sequence: Synthetic peptide
  N-term Ac
  MOD_RES (4)..(4): Alpha-Me R8-octenyl-alanine olefin amino acid connected by an all-carbon crosslinker comprising one double bond
  misc_feature (4)..(11): Crosslink between residues
  MOD_RES (11)..(11): Alpha-Me S5-pentenyl-alanine olefin amino acid connected by an all-carbon crosslinker comprising one double bond
  MOD_RES (14)..(14): Norleucine
  C-term NH2
LTFAAYWAQLAAALAA

SEQ ID NO: 330 - protein, 17 aa, Artificial Sequence
  Description of Artificial Sequence: Synthetic peptide
  N-term Ac
  MOD_RES (5)..(5): Alpha-Me R8-octenyl-alanine olefin amino acid connected by an all-carbon crosslinker comprising one double bond
  misc_feature (5)..(12): Crosslink between residues
  MOD_RES (12)..(12): Alpha-Me S5-pentenyl-alanine olefin amino acid connected by an all-carbon crosslinker comprising one double bond
  MOD_RES (15)..(15): Norleucine
  C-term NH2
ALTFAAYWAQLAAALAA

SEQ ID NO: 331 - protein, 16 aa, Artificial Sequence
  Description of Artificial Sequence: Synthetic peptide
  N-term Ac
  MOD_RES (4)..(4): Alpha-Me R8-octenyl-alanine olefin amino acid connected by an all-carbon crosslinker comprising one double bond
  misc_feature (4)..(11): Crosslink between residues
  MOD_RES (10)..(10): Cyclobutyl-Ala
  MOD_RES (11)..(11): Alpha-Me S5-pentenyl-alanine olefin amino acid connected by an all-carbon crosslinker comprising one double bond
  MOD_RES (14)..(14): Norleucine
  C-term NH2
LTFAAYWAQAAAALAA

SEQ ID NO: 332 - protein, 16 aa, Artificial Sequence
  Description of Artificial Sequence: Synthetic peptide
  N-term Ac
  MOD_RES (4)..(4): Alpha-Me R8-octenyl-alanine olefin amino acid connected by an all-carbon crosslinker comprising one double bond
  misc_feature (4)..(11): Crosslink between residues
  MOD_RES (10)..(10): hLeu
  MOD_RES (11)..(11): Alpha-Me S5-pentenyl-alanine olefin amino acid connected by an all-carbon crosslinker comprising one double bond
  MOD_RES (14)..(14): Norleucine
  C-term NH2
LTFAAYWAQLAAALAA

SEQ ID NO: 333 - protein, 15 aa, Artificial Sequence
  Description of Artificial Sequence: Synthetic peptide
  N-term Ac
  MOD_RES (4)..(4): Alpha-Me R8-octenyl-alanine olefin amino acid connected by an all-carbon crosslinker comprising one double bond
  misc_feature (4)..(11): Crosslink between residues
  MOD_RES (10)..(10): Cyclobutyl-Ala
  MOD_RES (11)..(11): Alpha-Me S5-pentenyl-alanine olefin amino acid connected by an all-carbon crosslinker comprising one double bond
  C-term NH2
LTFAEYWAQAASAAA

SEQ ID NO: 334 - protein, 15 aa, Artificial Sequence
  Description of Artificial Sequence: Synthetic peptide
  N-term Ac
  MOD_RES (4)..(4): Alpha-Me R8-octenyl-alanine olefin amino acid connected by an all-carbon crosslinker comprising one double bond
  misc_feature (4)..(11): Crosslink between residues
  MOD_RES (10)..(10): Cyclobutyl-Ala
  MOD_RES (11)..(11): Alpha-Me S5-pentenyl-alanine olefin amino acid connected by an all-carbon crosslinker comprising one double bond
  C-term NH2
LTFAEYWAQAASAAA

SEQ ID NO: 335 - protein, 16 aa, Artificial Sequence
  Description of Artificial Sequence: Synthetic peptide
  N-term Ac
  MOD_RES (4)..(4): Alpha-Me R8-octenyl-alanine olefin amino acid connected by an all-carbon crosslinker comprising one double bond
  misc_feature (4)..(11): Crosslink between residues
  MOD_RES (10)..(10): Cyclobutyl-Ala
  MOD_RES (11)..(11): Alpha-Me S5-pentenyl-alanine olefin amino acid connected by an all-carbon crosslinker comprising one double bond
  C-term NH2
LTFAEYWAQAASAAAA

SEQ ID NO: 336 - protein, 16 aa, Artificial Sequence
  Description of Artificial Sequence: Synthetic peptide
  N-term Ac
  MOD_RES (4)..(4): Alpha-Me R8-octenyl-alanine olefin amino acid connected by an all-carbon crosslinker comprising one double bond
  misc_feature (4)..(11): Crosslink between residues
  MOD_RES (10)..(10): Cyclobutyl-Ala
  MOD_RES (11)..(11): Alpha-Me S5-pentenyl-alanine olefin amino acid connected by an all-carbon crosslinker comprising one double bond
  C-term NH2
LTFAEYWAQAASAAAA

SEQ ID NO: 337 - protein, 15 aa, Artificial Sequence
  Description of Artificial Sequence: Synthetic peptide
  N-term Ac
  MOD_RES (5)..(5): Alpha-Me R8-octenyl-alanine olefin amino acid connected by an all-carbon crosslinker comprising one double bond
  misc_feature (5)..(12): Crosslink between residues
  MOD_RES (11)..(11): Cyclobutyl-Ala
  MOD_RES (12)..(12): Alpha-Me S5-pentenyl-alanine olefin amino acid connected by an all-carbon crosslinker comprising one double bond
  C-term NH2
ALTFAEYWAQAASAA

SEQ ID NO: 338 - protein, 16 aa, Artificial Sequence
  Description of Artificial Sequence: Synthetic peptide
  N-term Ac
  MOD_RES (5)..(5): Alpha-Me R8-octenyl-alanine olefin amino acid connected by an all-carbon crosslinker comprising one double bond
  misc_feature (5)..(12): Crosslink between residues
  MOD_RES (11)..(11): Cyclobutyl-Ala
  MOD_RES (12)..(12): Alpha-Me S5-pentenyl-alanine olefin amino acid connected by an all-carbon crosslinker comprising one double bond
  C-term NH2
ALTFAEYWAQAASAAA

SEQ ID NO: 339 - protein, 15 aa, Artificial Sequence
  Description of Artificial Sequence: Synthetic peptide
  N-term Ac
  MOD_RES (5)..(5): Alpha-Me R8-octenyl-alanine olefin amino acid connected by an all-carbon crosslinker comprising one double bond
  misc_feature (5)..(12): Crosslink between residues
  MOD_RES (11)..(11): Cyclobutyl-Ala
  MOD_RES (12)..(12): Alpha-Me S5-pentenyl-alanine olefin amino acid connected by an all-carbon crosslinker comprising one double bond
  C-term NH2
ALTFAEYWAQAASAA

SEQ ID NO: 340 - protein, 17 aa, Artificial Sequence
  Description of Artificial Sequence: Synthetic peptide
  N-term Ac
  MOD_RES (4)..(4): Alpha-Me R8-octenyl-alanine olefin amino acid connected by an all-carbon crosslinker comprising one double bond
  misc_feature (4)..(11): Crosslink between residues
  MOD_RES (11)..(11): Alpha-Me S5-pentenyl-alanine olefin amino acid connected by an all-carbon crosslinker comprising one double bond
  MOD_RES (17)..(17): D-amino acid
  C-term NH2
LTFAEYWAQLAAAAAAA

SEQ ID NO: 341 - protein, 14 aa, Artificial Sequence
  Description of Artificial Sequence: Synthetic peptide
  N-term Ac
  MOD_RES (4)..(4): Alpha-Me R8-octenyl-alanine olefin amino acid connected by an all-carbon crosslinker comprising one double bond
  misc_feature (4)..(11): Crosslink between residues
  MOD_RES (7)..(7): 6cl-Trp
  MOD_RES (10)..(10): Cyclobutyl-Ala
  MOD_RES (11)..(11): Alpha-Me S5-pentenyl-alanine olefin amino acid connected by an all-carbon crosslinker comprising one double bond
  C-term NH2
LTFAEYWAQAASAA

SEQ ID NO: 342 - protein, 15 aa, Artificial Sequence
  Description of Artificial Sequence: Synthetic peptide
  N-term Ac
  MOD_RES (4)..(4): Alpha-Me R8-octenyl-alanine olefin amino acid connected by an all-carbon crosslinker comprising one double bond
  misc_feature (4)..(11): Crosslink between residues
  MOD_RES (6)..(6): 4-carboxy Phe
  MOD_RES (7)..(7): 6cl-Trp
  MOD_RES (10)..(10): Cyclobutyl-Ala
  MOD_RES (11)..(11): Alpha-Me S5-pentenyl-alanine olefin amino acid connected by an all-carbon crosslinker comprising one double bond
  MOD_RES (14)..(14): Norleucine
  C-term NH2
LTFAEFWAQAASALA

SEQ ID NO: 343 - protein, 15 aa, Artificial Sequence
  Description of Artificial Sequence: Synthetic peptide
  N-term Ac
  MOD_RES (4)..(4): Alpha-Me R8-octenyl-alanine olefin amino acid connected by an all-carbon crosslinker comprising one double bond
  misc_feature (4)..(11): Crosslink between residues
  MOD_RES (6)..(6): 4-carboxy Phe
  MOD_RES (7)..(7): 6cl-Trp
  MOD_RES (10)..(10): Cyclobutyl-Ala
  MOD_RES (11)..(11): Alpha-Me S5-pentenyl-alanine olefin amino acid connected by an all-carbon crosslinker comprising one double bond
  MOD_RES (14)..(14): Norleucine
  C-term NH2
LTFAEFWAQAASALA

SEQ ID NO: 344 - protein, 15 aa, Artificial Sequence
  Description of Artificial Sequence: Synthetic peptide
  N-term Ac
  MOD_RES (4)..(4): Alpha-Me R8-octenyl-alanine olefin amino acid connected by an all-carbon crosslinker comprising one double bond
  misc_feature (4)..(11): Crosslink between residues
  MOD_RES (6)..(6): 4-carboxy Phe
  MOD_RES (7)..(7): 6cl-Trp
  MOD_RES (10)..(10): Cyclobutyl-Ala
  MOD_RES (11)..(11): Alpha-Me S5-pentenyl-alanine olefin amino acid connected by an all-carbon crosslinker comprising one double bond
  MOD_RES (15)..(15): D-amino acid
  C-term NH2
LTFAEFWAQAAAAIA

SEQ ID NO: 345 - protein, 15 aa, Artificial Sequence
  Description of Artificial Sequence: Synthetic peptide
  N-term Ac
  MOD_RES (4)..(4): Alpha-Me R8-octenyl-alanine olefin amino acid connected by an all-carbon crosslinker comprising one double bond
  misc_feature (4)..(11): Crosslink between residues
  MOD_RES (6)..(6): 4-carboxy Phe
  MOD_RES (7)..(7): 6cl-Trp
  MOD_RES (10)..(10): Cyclobutyl-Ala
  MOD_RES (11)..(11): Alpha-Me S5-pentenyl-alanine olefin amino acid connected by an all-carbon crosslinker comprising one double bond
  MOD_RES (15)..(15): D-amino acid
  C-term NH2
LTFAEFWAQAAAAIA

SEQ ID NO: 346 - protein, 17 aa, Artificial Sequence
  Description of Artificial Sequence: Synthetic peptide
  N-term Ac
  MOD_RES (4)..(4): Alpha-Me R8-octenyl-alanine olefin amino acid connected by an all-carbon crosslinker comprising one double bond
  misc_feature (4)..(11): Crosslink between residues
  MOD_RES (7)..(7): 6cl-Trp
  MOD_RES (11)..(11): Alpha-Me S5-pentenyl-alanine olefin amino acid connected by an all-carbon crosslinker comprising one double bond
  MOD_RES (17)..(17): D-amino acid
  C-term NH2
LTFAAYWAQLAAAAAAA

SEQ ID NO: 347 - protein, 17 aa, Artificial Sequence
  Description of Artificial Sequence: Synthetic peptide
  N-term Ac
  MOD_RES (4)..(4): Alpha-Me R8-octenyl-alanine olefin amino acid connected by an all-carbon crosslinker comprising one double bond
  misc_feature (4)..(11): Crosslink between residues
  MOD_RES (7)..(7): 6cl-Trp
  MOD_RES (11)..(11): Alpha-Me S5-pentenyl-alanine olefin amino acid connected by an all-carbon crosslinker comprising one double bond
  MOD_RES (17)..(17): D-amino acid
  C-term NH2
LTFAAYWAQLAAAAAAA

SEQ ID NO: 348 - protein, 16 aa, Artificial Sequence
  Description of Artificial Sequence: Synthetic peptide
  N-term Ac
  MOD_RES (2)..(2): Alpha-Me R8-octenyl-alanine olefin amino acid connected by an all-carbon crosslinker comprising one double bond
  misc_feature (2)..(4): Crosslink between residues
  MOD_RES (5)..(5): 6cl-Trp
  MOD_RES (16)..(16): D-amino acid
  C-term NH2
FAAYWEALAAAAAAAA

SEQ ID NO: 349 - protein, 17 aa, Artificial Sequence
  Description of Artificial Sequence: Synthetic peptide
  N-term Ac
  MOD_RES (4)..(4): Alpha-Me R8-octenyl-alanine olefin amino acid connected by an all-carbon crosslinker comprising one double bond
  misc_feature (4)..(11): Crosslink between residues
  MOD_RES (11)..(11): Alpha-Me S5-pentenyl-alanine olefin amino acid connected by an all-carbon crosslinker comprising one double bond
  MOD_RES (17)..(17): D-amino acid
  C-term NH2
ETFAEYWAQLAAAAAAA

SEQ ID NO: 350 - protein, 17 aa, Artificial Sequence
  Description of Artificial Sequence: Synthetic peptide
  N-term Ac
  MOD_RES (4)..(4): Alpha-Me R8-octenyl-alanine olefin amino acid connected by an all-carbon crosslinker comprising one double bond
  misc_feature (4)..(11): Crosslink between residues
  MOD_RES (11)..(11): Alpha-Me S5-pentenyl-alanine olefin amino acid connected by an all-carbon crosslinker comprising one double bond
  MOD_RES (17)..(17): D-amino acid
  C-term NH2
ETFAEYWAQLAAAAAAA

SEQ ID NO: 351 - protein, 18 aa, Artificial Sequence
  Description of Artificial Sequence: Synthetic peptide
  N-term Ac
  MOD_RES (4)..(4): Alpha-Me R8-octenyl-alanine olefin amino acid connected by an all-carbon crosslinker comprising one double bond
  misc_feature (4)..(11): Crosslink between residues
  MOD_RES (11)..(11): Alpha-Me S5-pentenyl-alanine olefin amino acid connected by an all-carbon crosslinker comprising one double bond
  MOD_RES (18)..(18): D-amino acid
  C-term NH2
LTFAEYWAQLAAAAAAAA

SEQ ID NO: 352 - protein, 18 aa, Artificial Sequence
  Description of Artificial Sequence: Synthetic peptide
  N-term Ac
  MOD_RES (4)..(4): Alpha-Me R8-octenyl-alanine olefin amino acid connected by an all-carbon crosslinker comprising one double bond
  misc_feature (4)..(11): Crosslink between residues
  MOD_RES (11)..(11): Alpha-Me S5-pentenyl-alanine olefin amino acid connected by an all-carbon crosslinker comprising one double bond
  MOD_RES (18)..(18): D-amino acid
  C-term NH2
LTFAEYWAQLAAAAAAAA

SEQ ID NO: 353 - protein, 17 aa, Artificial Sequence
  Description of Artificial Sequence: Synthetic peptide
  N-term Ac
  MOD_RES (4)..(4): Alpha-Me R8-octenyl-alanine olefin amino acid connected by an all-carbon crosslinker comprising one double bond
  misc_feature (4)..(11): Crosslink between residues
  MOD_RES (11)..(11): Alpha-Me S5-pentenyl-alanine olefin amino acid connected by an all-carbon crosslinker comprising one double bond
  MOD_RES (14)..(14): Norleucine
  MOD_RES (17)..(17): D-amino acid
  C-term NH2
LTFAAYWAQLAAALAAA

SEQ ID NO: 354 - protein, 17 aa, Artificial Sequence
  Description of Artificial Sequence: Synthetic peptide
  N-term Ac
  MOD_RES (4)..(4): Alpha-Me R8-octenyl-alanine olefin amino acid connected by an all-carbon crosslinker comprising one double bond
  misc_feature (4)..(11): Crosslink between residues
  MOD_RES (11)..(11): Alpha-Me S5-pentenyl-alanine olefin amino acid connected by an all-carbon crosslinker comprising one double bond
  MOD_RES (14)..(14): Norleucine
  MOD_RES (17)..(17): D-amino acid
  C-term NH2
LTFAAYWAQLAAALAAA

SEQ ID NO: 355 - protein, 17 aa, Artificial Sequence
  Description of Artificial Sequence: Synthetic peptide
  N-term Ac
  MOD_RES (4)..(4): Alpha-Me R8-octenyl-alanine olefin amino acid connected by an all-carbon crosslinker comprising one double bond
  misc_feature (4)..(11): Crosslink between residues
  MOD_RES (10)..(10): Cyclobutyl-Ala
  MOD_RES (11)..(11): Alpha-Me S5-pentenyl-alanine olefin amino acid connected by an all-carbon crosslinker comprising one double bond
  MOD_RES (17)..(17): D-amino acid
  C-term NH2
LTFAEYWAQAAAAAAAA

SEQ ID NO: 356 - protein, 17 aa, Artificial Sequence
  Description of Artificial Sequence: Synthetic peptide
  N-term Ac
  MOD_RES (4)..(4): Alpha-Me R8-octenyl-alanine olefin amino acid connected by an all-carbon crosslinker comprising one double bond
  misc_feature (4)..(11): Crosslink between residues
  MOD_RES (10)..(10): Cyclobutyl-Ala
  MOD_RES (11)..(11): Alpha-Me S5-pentenyl-alanine olefin amino acid connected by an all-carbon crosslinker comprising one double bond
  MOD_RES (17)..(17): D-amino acid
  C-term NH2
LTFAEYWAQAAAAAAAA

SEQ ID NO: 357 - protein, 17 aa, Artificial Sequence
  Description of Artificial Sequence: Synthetic peptide
  N-term Ac
  MOD_RES (4)..(4): Alpha-Me R8-octenyl-alanine olefin amino acid connected by an all-carbon crosslinker comprising one double bond
  misc_feature (4)..(11): Crosslink between residues
  MOD_RES (6)..(6): 4-carboxy Phe
  MOD_RES (10)..(10): Cyclobutyl-Ala
  MOD_RES (11)..(11): Alpha-Me S5-pentenyl-alanine olefin amino acid connected by an all-carbon crosslinker comprising one double bond
  MOD_RES (17)..(17): D-amino acid
  C-term NH2
LTFAEFWAQAAAAAAAA

SEQ ID NO: 358 - protein, 17 aa, Artificial Sequence
  Description of Artificial Sequence: Synthetic peptide
  N-term Ac
  MOD_RES (4)..(4): Alpha-Me R8-octenyl-alanine olefin amino acid connected by an all-carbon crosslinker comprising one double bond
  misc_feature (4)..(11): Crosslink between residues
  MOD_RES (6)..(6): 4-carboxy Phe
  MOD_RES (10)..(10): Cyclobutyl-Ala
  MOD_RES (11)..(11): Alpha-Me S5-pentenyl-alanine olefin amino acid connected by an all-carbon crosslinker comprising one double bond
  MOD_RES (17)..(17): D-amino acid
  C-term NH2
LTFAEFWAQAAAAAAAA

SEQ ID NO: 359 - protein, 17 aa, Artificial Sequence
  Description of Artificial Sequence: Synthetic peptide
  N-term Ac
  MOD_RES (4)..(4): Alpha-Me R8-octenyl-alanine olefin amino acid connected by an all-carbon crosslinker comprising one double bond
  misc_feature (4)..(11): Crosslink between residues
  MOD_RES (10)..(10): Cyclobutyl-Ala
  MOD_RES (11)..(11): Alpha-Me S5-pentenyl-alanine olefin amino acid connected by an all-carbon crosslinker comprising one double bond
  MOD_RES (17)..(17): D-amino acid
  C-term NH2
LTFAEYWSQAAAAAAAA

SEQ ID NO: 360 - protein, 17 aa, Artificial Sequence
  Description of Artificial Sequence: Synthetic peptide
  N-term Ac
  MOD_RES (4)..(4): Alpha-Me R8-octenyl-alanine olefin amino acid connected by an all-carbon crosslinker comprising one double bond
  misc_feature (4)..(11): Crosslink between residues
  MOD_RES (10)..(10): Cyclobutyl-Ala
  MOD_RES (11)..(11): Alpha-Me S5-pentenyl-alanine olefin amino acid connected by an all-carbon crosslinker comprising one double bond
  MOD_RES (17)..(17): D-amino acid
  C-term NH2
LTFAEYWSQAAAAAAAA

SEQ ID NO: 361 - protein, 15 aa, Artificial Sequence
  Description of Artificial Sequence: Synthetic peptide
  N-term Ac
  MOD_RES (4)..(4): Alpha-Me R8-octenyl-alanine olefin amino acid connected by an all-carbon crosslinker comprising one double bond
  misc_feature (4)..(11): Crosslink between residues
  MOD_RES (10)..(10): Cyclobutyl-Ala
  MOD_RES (11)..(11): Alpha-Me S5-pentenyl-alanine olefin amino acid connected by an all-carbon crosslinker comprising one double bond
  MOD_RES (15)..(15): D-amino acid
  C-term NH2
LTFAEYWAQAASAAA

SEQ ID NO: 362 - protein, 15 aa, Artificial Sequence
  Description of Artificial Sequence: Synthetic peptide
  N-term Ac
  MOD_RES (4)..(4): Alpha-Me R8-octenyl-alanine olefin amino acid connected by an all-carbon crosslinker comprising one double bond
  misc_feature (4)..(11): Crosslink between residues
  MOD_RES (10)..(10): Cyclobutyl-Ala
  MOD_RES (11)..(11): Alpha-Me S5-pentenyl-alanine olefin amino acid connected by an all-carbon crosslinker comprising one double bond
  MOD_RES (15)..(15): D-amino acid
  C-term NH2
LTFAEYWAQAASAAA

SEQ ID NO: 363 - protein, 16 aa, Artificial Sequence
  Description of Artificial Sequence: Synthetic peptide
  N-term Ac
  MOD_RES (5)..(5): Alpha-Me R8-octenyl-alanine olefin amino acid connected by an all-carbon crosslinker comprising one double bond
  misc_feature (5)..(12): Crosslink between residues
  MOD_RES (11)..(11): Cyclobutyl-Ala
  MOD_RES (12)..(12): Alpha-Me S5-pentenyl-alanine olefin amino acid connected by an all-carbon crosslinker comprising one double bond
  MOD_RES (16)..(16): D-amino acid
  C-term NH2
ALTFAEYWAQAASAAA

SEQ ID NO: 364 - protein, 16 aa, Artificial Sequence
  Description of Artificial Sequence: Synthetic peptide
  N-term Ac
  MOD_RES (5)..(5): Alpha-Me R8-octenyl-alanine olefin amino acid connected by an all-carbon crosslinker comprising one double bond
  misc_feature (5)..(12): Crosslink between residues
  MOD_RES (11)..(11): Cyclobutyl-Ala
  MOD_RES (12)..(12): Alpha-Me S5-pentenyl-alanine olefin amino acid connected by an all-carbon crosslinker comprising one double bond
  MOD_RES (16)..(16): D-amino acid
  C-term NH2
ALTFAEYWAQAASAAA

SEQ ID NO: 365 - protein, 17 aa, Artificial Sequence
  Description of Artificial Sequence: Synthetic peptide
  N-term Ac
  MOD_RES (5)..(5): Alpha-Me R8-octenyl-alanine olefin amino acid connected by an all-carbon crosslinker comprising one double bond
  misc_feature (5)..(12): Crosslink between residues
  MOD_RES (11)..(11): Cyclobutyl-Ala
  MOD_RES (12)..(12): Alpha-Me S5-pentenyl-alanine olefin amino acid connected by an all-carbon crosslinker comprising one double bond
  MOD_RES (17)..(17): D-amino acid
  C-term NH2
ALTFAEYWAQAASAAAA

SEQ ID NO: 366 - protein, 17 aa, Artificial Sequence
  Description of Artificial Sequence: Synthetic peptide
  N-term Ac
  MOD_RES (5)..(5): Alpha-Me R8-octenyl-alanine olefin amino acid connected by an all-carbon crosslinker comprising one double bond
  misc_feature (5)..(12): Crosslink between residues
  MOD_RES (11)..(11): Cyclobutyl-Ala
  MOD_RES (12)..(12): Alpha-Me S5-pentenyl-alanine olefin amino acid connected by an all-carbon crosslinker comprising one double bond
  MOD_RES (17)..(17): D-amino acid
  C-term NH2
ALTFAEYWAQAASAAAA

SEQ ID NO: 367 - protein, 18 aa, Artificial Sequence
  Description of Artificial Sequence: Synthetic peptide
  N-term Ac
  MOD_RES (6)..(6): Alpha-Me R8-octenyl-alanine olefin amino acid connected by an all-carbon crosslinker comprising one double bond
  misc_feature (6)..(13): Crosslink between residues
  MOD_RES (12)..(12): Cyclobutyl-Ala
  MOD_RES (13)..(13): Alpha-Me S5-pentenyl-alanine olefin amino acid connected by an all-carbon crosslinker comprising one double bond
  MOD_RES (18)..(18): D-amino acid
  C-term NH2
AALTFAEYWAQAASAAAA

SEQ ID NO: 368 - protein, 18 aa, Artificial Sequence
  Description of Artificial Sequence: Synthetic peptide
  N-term Ac
  MOD_RES (6)..(6): Alpha-Me R8-octenyl-alanine olefin amino acid connected by an all-carbon crosslinker comprising one double bond
  misc_feature (6)..(13): Crosslink between residues
  MOD_RES (12)..(12): Cyclobutyl-Ala
  MOD_RES (13)..(13): Alpha-Me S5-pentenyl-alanine olefin amino acid connected by an all-carbon crosslinker comprising one double bond
  MOD_RES (18)..(18): D-amino acid
  C-term NH2
AALTFAEYWAQAASAAAA

SEQ ID NO: 369 - protein, 14 aa, Artificial Sequence
  Description of Artificial Sequence: Synthetic peptide
  N-term Ac
  MOD_RES (4)..(4): Alpha-Me R8-octenyl-alanine olefin amino acid connected by an all-carbon crosslinker comprising one double bond
  misc_feature (4)..(11): Crosslink between residues
  MOD_RES (10)..(10): Cyclobutyl-Ala
  MOD_RES (11)..(11): Alpha-Me S5-pentenyl-alanine olefin amino acid connected by an all-carbon crosslinker comprising one double bond
  C-term NH2
RTFAEYWAQAASAA

SEQ ID NO: 370 - protein, 14 aa, Artificial Sequence
  Description of Artificial Sequence: Synthetic peptide
  N-term Ac
  MOD_RES (4)..(4): Alpha-Me R8-octenyl-alanine olefin amino acid connected by an all-carbon crosslinker comprising one double bond
  misc_feature (4)..(11): Crosslink between residues
  MOD_RES (10)..(10): Cyclobutyl-Ala
  MOD_RES (11)..(11): Alpha-Me S5-pentenyl-alanine olefin amino acid connected by an all-carbon crosslinker comprising one double bond
  C-term NH2
LRFAEYWAQAASAA

SEQ ID NO: 371 - protein, 14 aa, Artificial Sequence
  Description of Artificial Sequence: Synthetic peptide
  N-term Ac
  MOD_RES (4)..(4): Alpha-Me R8-octenyl-alanine olefin amino acid connected by an all-carbon crosslinker comprising one double bond
  misc_feature (4)..(11): Crosslink between residues
  MOD_RES (10)..(10): Cyclobutyl-Ala
  MOD_RES (11)..(11): Alpha-Me S5-pentenyl-alanine olefin amino acid connected by an all-carbon crosslinker comprising one double bond
  C-term NH2
LTFAEYWRQAASAA

SEQ ID NO: 372 - protein, 14 aa, Artificial Sequence
  Description of Artificial Sequence: Synthetic peptide
  N-term Ac
  MOD_RES (4)..(4): Alpha-Me R8-octenyl-alanine olefin amino acid connected by an all-carbon crosslinker comprising one double bond
  misc_feature (4)..(11): Crosslink between residues
  MOD_RES (10)..(10): Cyclobutyl-Ala
  MOD_RES (11)..(11): Alpha-Me S5-pentenyl-alanine olefin amino acid connected by an all-carbon crosslinker comprising one double bond
  C-term NH2
LTFAEYWARAASAA

SEQ ID NO: 373 - protein, 14 aa, Artificial Sequence
  Description of Artificial Sequence: Synthetic peptide
  N-term Ac
  MOD_RES (4)..(4): Alpha-Me R8-octenyl-alanine olefin amino acid connected by an all-carbon crosslinker comprising one double bond
  misc_feature (4)..(11): Crosslink between residues
  MOD_RES (10)..(10): Cyclobutyl-Ala
  MOD_RES (11)..(11): Alpha-Me S5-pentenyl-alanine olefin amino acid connected by an all-carbon crosslinker comprising one double bond
  C-term NH2
LTFAEYWAQAARAA

SEQ ID NO: 374 - protein, 14 aa, Artificial Sequence
  Description of Artificial Sequence: Synthetic peptide
  N-term Ac
  MOD_RES (4)..(4): Alpha-Me R8-octenyl-alanine olefin amino acid connected by an all-carbon crosslinker comprising one double bond
  misc_feature (4)..(11): Crosslink between residues
  MOD_RES (10)..(10): Cyclobutyl-Ala
  MOD_RES (11)..(11): Alpha-Me S5-pentenyl-alanine olefin amino acid connected by an all-carbon crosslinker comprising one double bond
  C-term NH2
LTFAEYWAQAASRA

SEQ ID NO: 375 - protein, 14 aa, Artificial Sequence
  Description of Artificial Sequence: Synthetic peptide
  N-term Ac
  MOD_RES (4)..(4): Alpha-Me R8-octenyl-alanine olefin amino acid connected by an all-carbon crosslinker comprising one double bond
  misc_feature (4)..(11): Crosslink between residues
  MOD_RES (10)..(10): Cyclobutyl-Ala
  MOD_RES (11)..(11): Alpha-Me S5-pentenyl-alanine olefin amino acid connected by an all-carbon crosslinker comprising one double bond
  C-term NH2
LTFAEYWAQAASAR

SEQ ID NO: 376 - protein, 15 aa, Artificial Sequence
  Description of Artificial Sequence: Synthetic peptide
  N-term 5-FAM
  MOD_RES (1)..(1): Beta-Ala
  MOD_RES (5)..(5): Alpha-Me R8-octenyl-alanine olefin amino acid connected by an all-carbon crosslinker comprising one double bond
  misc_feature (5)..(12): Crosslink between residues
  MOD_RES (11)..(11): Cyclobutyl-Ala
  MOD_RES (12)..(12): Alpha-Me S5-pentenyl-alanine olefin amino acid connected by an all-carbon crosslinker comprising one double bond
  C-term NH2
ALTFAEYWAQAASAA

SEQ ID NO: 377 - protein, 16 aa, Artificial Sequence
  Description of Artificial Sequence: Synthetic peptide
  N-term 5-FAM
  MOD_RES (1)..(1): Beta-Ala
  MOD_RES (5)..(5): Alpha-Me R8-octenyl-alanine olefin amino acid connected by an all-carbon crosslinker comprising one double bond
  misc_feature (5)..(12): Crosslink between residues
  MOD_RES (12)..(12): Alpha-Me S5-pentenyl-alanine olefin amino acid connected by an all-carbon crosslinker comprising one double bond
  MOD_RES (15)..(15): Norleucine
  C-term NH2
ALTFAAYWAQLAAALA

SEQ ID NO: 378 - protein, 15 aa, Artificial Sequence
  Description of Artificial Sequence: Synthetic peptide
  N-term Ac
  MOD_RES (4)..(4): Alpha-Me R8-octenyl-alanine olefin amino acid connected by an all-carbon crosslinker comprising one double bond
  misc_feature (4)..(11): Crosslink between residues
  MOD_RES (11)..(11): Alpha-Me S5-pentenyl-alanine olefin amino acid connected by an all-carbon crosslinker comprising one double bond
  MOD_RES (14)..(14): Norleucine
  C-term NH2
LAFAEYWAQLAAALA

SEQ ID NO: 379 - protein, 15 aa, Artificial Sequence
  Description of Artificial Sequence: Synthetic peptide
  N-term Ac
  MOD_RES (4)..(4): Alpha-Me R8-octenyl-alanine olefin amino acid connected by an all-carbon crosslinker comprising one double bond
  misc_feature (4)..(11): Crosslink between residues
  MOD_RES (11)..(11): Alpha-Me S5-pentenyl-alanine olefin amino acid connected by an all-carbon crosslinker comprising one double bond
  MOD_RES (14)..(14): Norleucine
  C-term NH2
ATFAEYWAQLAAALA

SEQ ID NO: 380 - protein, 15 aa, Artificial Sequence
  Description of Artificial Sequence: Synthetic peptide
  N-term Ac
  MOD_RES (4)..(4): Alpha-Me R8-octenyl-alanine olefin amino acid connected by an all-carbon crosslinker comprising one double bond
  misc_feature (4)..(11): Crosslink between residues
  MOD_RES (11)..(11): Alpha-Me S5-pentenyl-alanine olefin amino acid connected by an all-carbon crosslinker comprising one double bond
  MOD_RES (14)..(14): Norleucine
  C-term NH2
AAFAEYWAQLAAALA

SEQ ID NO: 381 - protein, 16 aa, Artificial Sequence
  Description of Artificial Sequence: Synthetic peptide
  N-term Ac
  MOD_RES (5)..(5): Alpha-Me R8-octenyl-alanine olefin amino acid connected by an all-carbon crosslinker comprising one double bond
  misc_feature (5)..(12): Crosslink between residues
  MOD_RES (12)..(12): Alpha-Me S5-pentenyl-alanine olefin amino acid connected by an all-carbon crosslinker comprising one double bond
  MOD_RES (15)..(15): Norleucine
  C-term NH2
AAAFAEYWAQLAAALA

SEQ ID NO: 382 - protein, 17 aa, Artificial Sequence
  Description of Artificial Sequence: Synthetic peptide
  N-term Ac
  MOD_RES (6)..(6): Alpha-Me R8-octenyl-alanine olefin amino acid connected by an all-carbon crosslinker comprising one double bond
  misc_feature (6)..(13): Crosslink between residues
  MOD_RES (13)..(13): Alpha-Me S5-pentenyl-alanine olefin amino acid connected by an all-carbon crosslinker comprising one double bond
  MOD_RES (16)..(16): Norleucine
  C-term NH2
AAAAFAEYWAQLAAALA

SEQ ID NO: 383 - protein, 16 aa, Artificial Sequence
  Description of Artificial Sequence: Synthetic peptide
  N-term Ac
  MOD_RES (5)..(5): Alpha-Me R8-octenyl-alanine olefin amino acid connected by an all-carbon crosslinker comprising one double bond
  misc_feature (5)..(12): Crosslink between residues
  MOD_RES (12)..(12): Alpha-Me S5-pentenyl-alanine olefin amino acid connected by an all-carbon crosslinker comprising one double bond
  MOD_RES (15)..(15): Norleucine
  C-term NH2
AATFAEYWAQLAAALA

SEQ ID NO: 384 - protein, 17 aa, Artificial Sequence
  Description of Artificial Sequence: Synthetic peptide
  N-term Ac
  MOD_RES (6)..(6): Alpha-Me R8-octenyl-alanine olefin amino acid connected by an all-carbon crosslinker comprising one double bond
  misc_feature (6)..(13): Crosslink between residues
  MOD_RES (13)..(13): Alpha-Me S5-pentenyl-alanine olefin amino acid connected by an all-carbon crosslinker comprising one double bond
  MOD_RES (16)..(16): Norleucine
  C-term NH2
AALTFAEYWAQLAAALA

SEQ ID NO: 385 - protein, 18 aa, Artificial Sequence
  Description of Artificial Sequence: Synthetic peptide
  N-term Ac
  MOD_RES (7)..(7): Alpha-Me R8-octenyl-alanine olefin amino acid connected by an all-carbon crosslinker comprising one double bond
  misc_feature (7)..(14): Crosslink between residues
  MOD_RES (14)..(14): Alpha-Me S5-pentenyl-alanine olefin amino acid connected by an all-carbon crosslinker comprising one double bond
  MOD_RES (17)..(17): Norleucine
  C-term NH2
AAALTFAEYWAQLAAALA

SEQ ID NO: 386 - protein, 16 aa, Artificial Sequence
  Description of Artificial Sequence: Synthetic peptide
  N-term Ac
  MOD_RES (4)..(4): Alpha-Me R8-octenyl-alanine olefin amino acid connected by an all-carbon crosslinker comprising one double bond
  misc_feature (4)..(11): Crosslink between residues
  MOD_RES (11)..(11): Alpha-Me S5-pentenyl-alanine olefin amino acid connected by an all-carbon crosslinker comprising one double bond
  MOD_RES (14)..(14): Norleucine
  C-term NH2
LTFAEYWAQLAAALAA

SEQ ID NO: 387 - protein, 17 aa, Artificial Sequence
  Description of Artificial Sequence: Synthetic peptide
  N-term Ac
  MOD_RES (5)..(5): Alpha-Me R8-octenyl-alanine olefin amino acid connected by an all-carbon crosslinker comprising one double bond
  misc_feature (5)..(12): Crosslink between residues
  MOD_RES (12)..(12): Alpha-Me S5-pentenyl-alanine olefin amino acid connected by an all-carbon crosslinker comprising one double bond
  MOD_RES (15)..(15): Norleucine
  C-term NH2
ALTFAEYWAQLAAALAA

SEQ ID NO: 388 - protein, 18 aa, Artificial Sequence
  Description of Artificial Sequence: Synthetic peptide
  N-term Ac
  MOD_RES (6)..(6): Alpha-Me R8-octenyl-alanine olefin amino acid connected by an all-carbon crosslinker comprising one double bond
  misc_feature (6)..(13): Crosslink between residues
  MOD_RES (13)..(13): Alpha-Me S5-pentenyl-alanine olefin amino acid connected by an all-carbon crosslinker comprising one double bond
  MOD_RES (16)..(16): Norleucine
  C-term NH2
AALTFAEYWAQLAAALAA

SEQ ID NO: 389 - protein, 16 aa, Artificial Sequence
  Description of Artificial Sequence: Synthetic peptide
  N-term Ac
  MOD_RES (4)..(4): Alpha-Me R8-octenyl-alanine olefin amino acid connected by an all-carbon crosslinker comprising one double bond
  misc_feature (4)..(11): Crosslink between residues
  MOD_RES (10)..(10): Cyclobutyl-Ala
  MOD_RES (11)..(11): Alpha-Me S5-pentenyl-alanine olefin amino acid connected by an all-carbon crosslinker comprising one double bond
  MOD_RES (14)..(14): Norleucine
  C-term NH2
LTFAEYWAQAAAALAA

SEQ ID NO: 390 - protein, 16 aa, Artificial Sequence
  Description of Artificial Sequence: Synthetic peptide
  N-term Ac
  MOD_RES (4)..(4): Alpha-Me R8-octenyl-alanine olefin amino acid connected by an all-carbon crosslinker comprising one double bond
  misc_feature (4)..(11): Crosslink between residues
  MOD_RES (10)..(10): hLeu
  MOD_RES (11)..(11): Alpha-Me S5-pentenyl-alanine olefin amino acid connected by an all-carbon crosslinker comprising one double bond
  MOD_RES (14)..(14): Norleucine
  C-term NH2
LTFAEYWAQLAAALAA

SEQ ID NO: 391 - protein, 17 aa, Artificial Sequence
  Description of Artificial Sequence: Synthetic peptide
  N-term Ac
  MOD_RES (5)..(5): Alpha-Me R8-octenyl-alanine olefin amino acid connected by an all-carbon crosslinker comprising one double bond
  misc_feature (5)..(12): Crosslink between residues
  MOD_RES (11)..(11): hLeu
  MOD_RES (12)..(12): Alpha-Me S5-pentenyl-alanine olefin amino acid connected by an all-carbon crosslinker comprising one double bond
  MOD_RES (15)..(15): Norleucine
  C-term NH2
ALTFAEYWAQLAAALAA

SEQ ID NO: 392 - protein, 15 aa, Artificial Sequence
  Description of Artificial Sequence: Synthetic peptide
  N-term Ac
  MOD_RES (4)..(4): Alpha-Me R8-octenyl-alanine olefin amino acid connected by an all-carbon crosslinker comprising one double bond
  misc_feature (4)..(11): Crosslink between residues
  MOD_RES (6)..(6): N-methyl-Tyr
  MOD_RES (11)..(11): Alpha-Me S5-pentenyl-alanine olefin amino acid connected by an all-carbon crosslinker comprising one double bond
  MOD_RES (14)..(14): Norleucine
  C-term NH2
LTFAAYWAQLAAALA

SEQ ID NO: 393 - protein, 15 aa, Artificial Sequence
  Description of Artificial Sequence: Synthetic peptide
  N-term Ac
  MOD_RES (4)..(4): Alpha-Me R8-octenyl-alanine olefin amino acid connected by an all-carbon crosslinker comprising one double bond
  misc_feature (4)..(11): Crosslink between residues
  MOD_RES (6)..(6): N-methyl-Tyr
  MOD_RES (11)..(11): Alpha-Me S5-pentenyl-alanine olefin amino acid connected by an all-carbon crosslinker comprising one double bond
  MOD_RES (14)..(14): Norleucine
  C-term NH2
LTFAAYWAQLAAALA

SEQ ID NO: 394 - protein, 15 aa, Artificial Sequence
  Description of Artificial Sequence: Synthetic peptide
  N-term Ac
  MOD_RES (4)..(4): Alpha-Me R8-octenyl-alanine olefin amino acid connected by an all-carbon crosslinker comprising one double bond
  misc_feature (4)..(11): Crosslink between residues
  MOD_RES (7)..(7): N-methyl-Trp
  MOD_RES (11)..(11): Alpha-Me S5-pentenyl-alanine olefin amino acid connected by an all-carbon crosslinker comprising one double bond
  MOD_RES (14)..(14): Norleucine
  C-term NH2
LTFAAYWAQLAAALA

SEQ ID NO: 395 - protein, 15 aa, Artificial Sequence
  Description of Artificial Sequence: Synthetic peptide
  N-term Ac
  MOD_RES (4)..(4): Alpha-Me R8-octenyl-alanine olefin amino acid connected by an all-carbon crosslinker comprising one double bond
  misc_feature (4)..(11): Crosslink between residues
  MOD_RES (7)..(7): N-methyl-Trp
  MOD_RES (11)..(11): Alpha-Me S5-pentenyl-alanine olefin amino acid connected by an all-carbon crosslinker comprising one double bond
  MOD_RES (14)..(14): Norleucine
  C-term NH2
LTFAAYWAQLAAALA

SEQ ID NO: 396 - protein, 15 aa, Artificial Sequence
  Description of Artificial Sequence: Synthetic peptide
  N-term Ac
  MOD_RES (4)..(4): Alpha-Me R8-octenyl-alanine olefin amino acid connected by an all-carbon crosslinker comprising one double bond
  misc_feature (4)..(11): Crosslink between residues
  MOD_RES (7)..(7): Alpha-Me-Trp
  MOD_RES (11)..(11): Alpha-Me S5-pentenyl-alanine olefin amino acid connected by an all-carbon crosslinker comprising one double bond
  MOD_RES (14)..(14): Norleucine
  C-term NH2
LTFAAYWAQLAAALA

SEQ ID NO: 397 - protein, 15 aa, Artificial Sequence
  Description of Artificial Sequence: Synthetic peptide
  N-term Ac
  MOD_RES (4)..(4): Alpha-Me R8-octenyl-alanine olefin amino acid connected by an all-carbon crosslinker comprising one double bond
  misc_feature (4)..(11): Crosslink between residues
  MOD_RES (7)..(7): Alpha-Me-Trp
  MOD_RES (11)..(11): Alpha-Me S5-pentenyl-alanine olefin amino acid connected by an all-carbon crosslinker comprising one double bond
  MOD_RES (14)..(14): Norleucine
  C-term NH2
LTFAAYWAQLAAALA

SEQ ID NO: 398 - protein, 15 aa, Artificial Sequence
  Description of Artificial Sequence: Synthetic peptide
  N-term Ac
  MOD_RES (4)..(4): Alpha-Me R8-octenyl-alanine olefin amino acid connected by an all-carbon crosslinker comprising one double bond
  misc_feature (4)..(11): Crosslink between residues
  MOD_RES (8)..(8): 2-aminoisobutyric acid
  MOD_RES (11)..(11): Alpha-Me S5-pentenyl-alanine olefin amino acid connected by an all-carbon crosslinker comprising one double bond
  MOD_RES (14)..(14): Norleucine
  C-term NH2
LTFAAYWXQLAAALA

SEQ ID NO: 399 - protein, 15 aa, Artificial Sequence
  Description of Artificial Sequence: Synthetic peptide
  N-term Ac
  MOD_RES (4)..(4): Alpha-Me R8-octenyl-alanine olefin amino acid connected by an all-carbon crosslinker comprising one double bond
  misc_feature (4)..(11): Crosslink between residues
  MOD_RES (8)..(8): 2-aminoisobutyric acid
  MOD_RES (11)..(11): Alpha-Me S5-pentenyl-alanine olefin amino acid connected by an all-carbon crosslinker comprising one double bond
  MOD_RES (14)..(14): Norleucine
  C-term NH2
LTFAAYWXQLAAALA

SEQ ID NO: 400 - protein, 15 aa, Artificial Sequence
  Description of Artificial Sequence: Synthetic peptide
  N-term Ac
  MOD_RES (4)..(4): Alpha-Me R8-octenyl-alanine olefin amino acid connected by an all-carbon crosslinker comprising one double bond
  misc_feature (4)..(11): Crosslink between residues
  MOD_RES (11)..(11): Alpha-Me S5-pentenyl-alanine olefin amino acid connected by an all-carbon crosslinker comprising one double bond
  MOD_RES (13)..(13): 2-aminoisobutyric acid
  MOD_RES (14)..(14): Norleucine
  C-term NH2
LTFAAYWAQLAAXLA

SEQ ID NO: 401 - protein, 15 aa, Artificial Sequence
  Description of Artificial Sequence: Synthetic peptide
  N-term Ac
  MOD_RES (4)..(4): Alpha-Me R8-octenyl-alanine olefin amino acid connected by an all-carbon crosslinker comprising one double bond
  misc_feature (4)..(11): Crosslink between residues
  MOD_RES (11)..(11): Alpha-Me S5-pentenyl-alanine olefin amino acid connected by an all-carbon crosslinker comprising one double bond
  MOD_RES (13)..(13): 2-aminoisobutyric acid
  MOD_RES (14)..(14): Norleucine
  C-term NH2
LTFAAYWAQLAAXLA

SEQ ID NO: 402 - protein, 15 aa, Artificial Sequence
  Description of Artificial Sequence: Synthetic peptide
  N-term Ac
  MOD_RES (4)..(4): Alpha-Me R8-octenyl-alanine olefin amino acid connected by an all-carbon crosslinker comprising one double bond
  misc_feature (4)..(11): Crosslink between residues
  MOD_RES (11)..(11): Alpha-Me S5-pentenyl-alanine olefin amino acid connected by an all-carbon crosslinker comprising one double bond
  MOD_RES (13)..(13): D-amino acid
  MOD_RES (14)..(14): Norleucine
  C-term NH2
LTFAAYWAQLAAALA

SEQ ID NO: 403 - protein, 15 aa, Artificial Sequence
  Description of Artificial Sequence: Synthetic peptide
  N-term Ac
  MOD_RES (4)..(4): Alpha-Me R8-octenyl-alanine olefin amino acid connected by an all-carbon crosslinker comprising one double bond
  misc_feature (4)..(11): Crosslink between residues
  MOD_RES (11)..(11): Alpha-Me S5-pentenyl-alanine olefin amino acid connected by an all-carbon crosslinker comprising one double bond
  MOD_RES (13)..(13): D-amino acid
  MOD_RES (14)..(14): Norleucine
  C-term NH2
LTFAAYWAQLAAALA

SEQ ID NO: 404 - protein, 15 aa, Artificial Sequence
  Description of Artificial Sequence: Synthetic peptide
  N-term Ac
  MOD_RES (4)..(4): Alpha-Me R8-octenyl-alanine olefin amino acid connected by an all-carbon crosslinker comprising one double bond
  misc_feature (4)..(11): Crosslink between residues
  MOD_RES (11)..(11): Alpha-Me S5-pentenyl-alanine olefin amino acid connected by an all-carbon crosslinker comprising one double bond
  MOD_RES (13)..(13): Sarcosine
  MOD_RES (14)..(14): Norleucine
  C-term NH2
LTFAAYWAQLAAXLA

SEQ ID NO: 405 - protein, 15 aa, Artificial Sequence
  Description of Artificial Sequence: Synthetic peptide
  N-term Ac
  MOD_RES (4)..(4): Alpha-Me R8-octenyl-alanine olefin amino acid connected by an all-carbon crosslinker comprising one double bond
  misc_feature (4)..(11): Crosslink between residues
  MOD_RES (11)..(11): Alpha-Me S5-pentenyl-alanine olefin amino acid connected by an all-carbon crosslinker comprising one double bond
  MOD_RES (13)..(13): Sarcosine
  MOD_RES (14)..(14): Norleucine
  C-term NH2
LTFAAYWAQLAAXLA

SEQ ID NO: 406 - protein, 15 aa, Artificial Sequence
  Description of Artificial Sequence: Synthetic peptide
  N-term Ac
  MOD_RES (4)..(4): Alpha-Me R8-octenyl-alanine olefin amino acid connected by an all-carbon crosslinker comprising one double bond
  misc_feature (4)..(11): Crosslink between residues
  MOD_RES (11)..(11): Alpha-Me S5-pentenyl-alanine olefin amino acid connected by an all-carbon crosslinker comprising one double bond
  MOD_RES (14)..(14): Norleucine
  MOD_RES (15)..(15): 2-aminoisobutyric acid
  C-term NH2
LTFAAYWAQLAAALX

SEQ ID NO: 407 - protein, 15 aa, Artificial Sequence
  Description of Artificial Sequence: Synthetic peptide
  N-term Ac
  MOD_RES (4)..(4): Alpha-Me R8-octenyl-alanine olefin amino acid connected by an all-carbon crosslinker comprising one double bond
  misc_feature (4)..(11): Crosslink between residues
  MOD_RES (11)..(11): Alpha-Me S5-pentenyl-alanine olefin amino acid connected by an all-carbon crosslinker comprising one double bond
  MOD_RES (14)..(14): Norleucine
  MOD_RES (15)..(15): 2-aminoisobutyric acid
  C-term NH2
LTFAAYWAQLAAALX

SEQ ID NO: 408 - protein, 15 aa, Artificial Sequence
  Description of Artificial Sequence: Synthetic peptide
  N-term Ac
  MOD_RES (4)..(4): Alpha-Me R8-octenyl-alanine olefin amino acid connected by an all-carbon crosslinker comprising one double bond
  misc_feature (4)..(11): Crosslink between residues
  MOD_RES (11)..(11): Alpha-Me S5-pentenyl-alanine olefin amino acid connected by an all-carbon crosslinker comprising one double bond
  MOD_RES (14)..(14): Norleucine
  MOD_RES (15)..(15): N-methyl-Ala
  C-term NH2
LTFAAYWAQLAAALA

SEQ ID NO: 409 - protein, 15 aa, Artificial Sequence
  Description of Artificial Sequence: Synthetic peptide
  N-term Ac
  MOD_RES (4)..(4): Alpha-Me R8-octenyl-alanine olefin amino acid connected by an all-carbon crosslinker comprising one double bond
  misc_feature (4)..(11): Crosslink between residues
  MOD_RES (11)..(11): Alpha-Me S5-pentenyl-alanine olefin amino acid connected by an all-carbon crosslinker comprising one double bond
  MOD_RES (14)..(14): Norleucine
  MOD_RES (15)..(15): N-methyl-Ala
  C-term NH2
LTFAAYWAQLAAALA

SEQ ID NO: 410 - protein, 15 aa, Artificial Sequence
  Description of Artificial Sequence: Synthetic peptide
  N-term Ac
  MOD_RES (4)..(4): Alpha-Me R8-octenyl-alanine olefin amino acid connected by an all-carbon crosslinker comprising one double bond
  misc_feature (4)..(11): Crosslink between residues
  MOD_RES (11)..(11): Alpha-Me S5-pentenyl-alanine olefin amino acid connected by an all-carbon crosslinker comprising one double bond
  MOD_RES (14)..(14): Norleucine
  MOD_RES (15)..(15): Sarcosine
  C-term NH2
LTFAAYWAQLAAALX

SEQ ID NO: 411 - protein, 15 aa, Artificial Sequence
  Description of Artificial Sequence: Synthetic peptide
  N-term Ac
  MOD_RES (4)..(4): Alpha-Me R8-octenyl-alanine olefin amino acid connected by an all-carbon crosslinker comprising one double bond
  misc_feature (4)..(11): Crosslink between residues
  MOD_RES (11)..(11): Alpha-Me S5-pentenyl-alanine olefin amino acid connected by an all-carbon crosslinker comprising one double bond
  MOD_RES (14)..(14): Norleucine
  MOD_RES (15)..(15): Sarcosine
  C-term NH2
LTFAAYWAQLAAALX

SEQ ID NO: 412 - protein, 16 aa, Artificial Sequence
  Description of Artificial Sequence: Synthetic peptide
  N-term Ac
  MOD_RES (4)..(4): Alpha-Me R8-octenyl-alanine olefin amino acid connected by an all-carbon crosslinker comprising one double bond
  misc_feature (4)..(11): Crosslink between residues
  MOD_RES (11)..(11): Alpha-Me S5-pentenyl-alanine olefin amino acid connected by an all-carbon crosslinker comprising one double bond
  MOD_RES (14)..(14): Norleucine
  MOD_RES (16)..(16): 2-aminoisobutyric acid
  C-term NH2
LTFAAYWAQLAAALAX

SEQ ID NO: 413 - protein, 16 aa, Artificial Sequence
  Description of Artificial Sequence: Synthetic peptide
  N-term Ac
  MOD_RES (4)..(4): Alpha-Me R8-octenyl-alanine olefin amino acid connected by an all-carbon crosslinker comprising one double bond
  misc_feature (4)..(11): Crosslink between residues
  MOD_RES (11)..(11): Alpha-Me S5-pentenyl-alanine olefin amino acid connected by an all-carbon crosslinker comprising one double bond
  MOD_RES (14)..(14): Norleucine
  MOD_RES (16)..(16): 2-aminoisobutyric acid
  C-term NH2
LTFAAYWAQLAAALAX

SEQ ID NO: 414 - protein, 16 aa, Artificial Sequence
  Description of Artificial Sequence: Synthetic peptide
  N-term Ac
  MOD_RES (4)..(4): Alpha-Me R8-octenyl-alanine olefin amino acid connected by an all-carbon crosslinker comprising one double bond
  misc_feature (4)..(11): Crosslink between residues
  MOD_RES (11)..(11): Alpha-Me S5-pentenyl-alanine olefin amino acid connected by an all-carbon crosslinker comprising one double bond
  MOD_RES (14)..(14): Norleucine
  MOD_RES (16)..(16): N-methyl-Ala
  C-term NH2
LTFAAYWAQLAAALAA

SEQ ID NO: 415 - protein, 16 aa, Artificial Sequence
  Description of Artificial Sequence: Synthetic peptide
  N-term Ac
  MOD_RES (4)..(4): Alpha-Me R8-octenyl-alanine olefin amino acid connected by an all-carbon crosslinker comprising one double bond
  misc_feature (4)..(11): Crosslink between residues
  MOD_RES (11)..(11): Alpha-Me S5-pentenyl-alanine olefin amino acid connected by an all-carbon crosslinker comprising one double bond
  MOD_RES (14)..(14): Norleucine
  MOD_RES (16)..(16): N-methyl-Ala
  C-term NH2
LTFAAYWAQLAAALAA

SEQ ID NO: 416 - protein, 16 aa, Artificial Sequence
  Description of Artificial Sequence: Synthetic peptide
  N-term Ac
  MOD_RES (4)..(4): Alpha-Me R8-octenyl-alanine olefin amino acid connected by an all-carbon crosslinker comprising one double bond
  misc_feature (4)..(11): Crosslink between residues
  MOD_RES (11)..(11): Alpha-Me S5-pentenyl-alanine olefin amino acid connected by an all-carbon crosslinker comprising one double bond
  MOD_RES (14)..(14): Norleucine
  MOD_RES (16)..(16): D-amino acid
  C-term NH2
LTFAAYWAQLAAALAA

SEQ ID NO: 417 - protein, 16 aa, Artificial Sequence
  Description of Artificial Sequence: Synthetic peptide
  N-term Ac
  MOD_RES (4)..(4): Alpha-Me R8-octenyl-alanine olefin amino acid connected by an all-carbon crosslinker comprising one double bond
  misc_feature (4)..(11): Crosslink between residues
  MOD_RES (11)..(11): Alpha-Me S5-pentenyl-alanine olefin amino acid connected by an all-carbon crosslinker comprising one double bond
  MOD_RES (14)..(14): Norleucine
  MOD_RES (16)..(16): D-amino acid
  C-term NH2
LTFAAYWAQLAAALAA

SEQ ID NO: 418 - protein, 16 aa, Artificial Sequence
  Description of Artificial Sequence: Synthetic peptide
  N-term Ac
  MOD_RES (4)..(4): Alpha-Me R8-octenyl-alanine olefin amino acid connected by an all-carbon crosslinker comprising one double bond
  misc_feature (4)..(11): Crosslink between residues
  MOD_RES (11)..(11): Alpha-Me S5-pentenyl-alanine olefin amino acid connected by an all-carbon crosslinker comprising one double bond
  MOD_RES (14)..(14): Norleucine
  MOD_RES (16)..(16): Sarcosine
  C-term NH2
LTFAAYWAQLAAALAX

SEQ ID NO: 419 - protein, 16 aa, Artificial Sequence
  Description of Artificial Sequence: Synthetic peptide
  N-term Ac
  MOD_RES (4)..(4): Alpha-Me R8-octenyl-alanine olefin amino acid connected by an all-carbon crosslinker comprising one double bond
  misc_feature (4)..(11): Crosslink between residues
  MOD_RES (11)..(11): Alpha-Me S5-pentenyl-alanine olefin amino acid connected by an all-carbon crosslinker comprising one double bond
  MOD_RES (14)..(14): Norleucine
  MOD_RES (16)..(16): Sarcosine
  C-term NH2
LTFAAYWAQLAAALAX

SEQ ID NO: 420 - protein, 15 aa, Artificial Sequence
  Description of Artificial Sequence: Synthetic peptide
  N-term Ac
  MOD_RES (4)..(4): Alpha-Me R8-octenyl-alanine olefin amino acid that is not connected by a crosslinker
  MOD_RES (11)..(11): Alpha-Me S5-pentenyl-alanine olefin amino acid that is not connected by a crosslinker
  MOD_RES (14)..(14): Norleucine
  C-term NH2
LTFAAYWAQLAAALA

SEQ ID NO: 421 - protein, 15 aa, Artificial Sequence
  Description of Artificial Sequence: Synthetic peptide
  N-term Ac
  MOD_RES (4)..(4): 2-aminoisobutyric acid
  MOD_RES (11)..(11): 2-aminoisobutyric acid
  MOD_RES (14)..(14): Norleucine
  C-term NH2
LTFXAYWAQLXAALA

SEQ ID NO: 422 - protein, 15 aa, Artificial Sequence
  Description of Artificial Sequence: Synthetic peptide
  N-term Ac
  MOD_RES (4)..(4): Alpha-Me R8-octenyl-alanine olefin amino acid connected by an all-carbon crosslinker comprising one double bond
  misc_feature (4)..(11): Crosslink between residues
  MOD_RES (5)..(5): Cou4
  MOD_RES (11)..(11): Alpha-Me S5-pentenyl-alanine olefin amino acid connected by an all-carbon crosslinker comprising one double bond
  MOD_RES (14)..(14): Norleucine
  C-term NH2
LTFAXYWAQLAAALA

SEQ ID NO: 423 - protein, 15 aa, Artificial Sequence
  Description of Artificial Sequence: Synthetic peptide
  N-term Ac
  MOD_RES (4)..(4): Alpha-Me R8-octenyl-alanine olefin amino acid connected by an all-carbon crosslinker comprising one double bond
  misc_feature (4)..(11): Crosslink between residues
  MOD_RES (5)..(5): Cou4
  MOD_RES (11)..(11): Alpha-Me S5-pentenyl-alanine olefin amino acid connected by an all-carbon crosslinker comprising one double bond
  MOD_RES (14)..(14): Norleucine
  C-term NH2
LTFAXYWAQLAAALA

SEQ ID NO: 424 - protein, 15 aa, Artificial Sequence
  Description of Artificial Sequence: Synthetic peptide
  N-term Ac
  MOD_RES (4)..(4): Alpha-Me R8-octenyl-alanine olefin amino acid connected by an all-carbon crosslinker comprising one double bond
  misc_feature (4)..(11): Crosslink between residues
  MOD_RES (8)..(8): Cou4
  MOD_RES (11)..(11): Alpha-Me S5-pentenyl-alanine olefin amino acid connected by an all-carbon crosslinker comprising one double bond
  MOD_RES (14)..(14): Norleucine
  C-term NH2
LTFAAYWXQLAAALA

SEQ ID NO: 425 - protein, 15 aa, Artificial Sequence
  Description of Artificial Sequence: Synthetic peptide
  N-term Ac
  MOD_RES (4)..(4): Alpha-Me R8-octenyl-alanine olefin amino acid connected by an all-carbon crosslinker comprising one double bond
  misc_feature (4)..(11): Crosslink between residues
  MOD_RES (11)..(11): Alpha-Me S5-pentenyl-alanine olefin amino acid connected by an all-carbon crosslinker comprising one double bond
  MOD_RES (12)..(12): Cou4
  MOD_RES (14)..(14): Norleucine
  C-term NH2
LTFAAYWAQLAXALA

SEQ ID NO: 426 - protein, 15 aa, Artificial Sequence
  Description of Artificial Sequence: Synthetic peptide
  N-term Ac
  MOD_RES (4)..(4): Alpha-Me R8-octenyl-alanine olefin amino acid connected by an all-carbon crosslinker comprising one double bond
  misc_feature (4)..(11): Crosslink between residues
  MOD_RES (11)..(11): Alpha-Me S5-pentenyl-alanine olefin amino acid connected by an all-carbon crosslinker comprising one double bond
  MOD_RES (12)..(12): Cou4
  MOD_RES (14)..(14): Norleucine
  C-term NH2
LTFAAYWAQLAXALA

SEQ ID NO: 427 - protein, 15 aa, Artificial Sequence
  Description of Artificial Sequence: Synthetic peptide
  N-term Ac
  MOD_RES (4)..(4): Alpha-Me R8-octenyl-alanine olefin amino acid connected by an all-carbon crosslinker comprising one double bond
  misc_feature (4)..(11): Crosslink between residues
  MOD_RES (11)..(11): Alpha-Me S5-pentenyl-alanine olefin amino acid connected by an all-carbon crosslinker comprising one double bond
  MOD_RES (13)..(13): Cou4
  MOD_RES (14)..(14): Norleucine
  C-term NH2
LTFAAYWAQLAAXLA

SEQ ID NO: 428 - protein, 15 aa, Artificial Sequence
  Description of Artificial Sequence: Synthetic peptide
  N-term Ac
  MOD_RES (4)..(4): Alpha-Me R8-octenyl-alanine olefin amino acid connected by an all-carbon crosslinker comprising one double bond
  misc_feature (4)..(11): Crosslink between residues
  MOD_RES (11)..(11): Alpha-Me S5-pentenyl-alanine olefin amino acid connected by an all-carbon crosslinker comprising one double bond
  MOD_RES (13)..(13): Cou4
  MOD_RES (14)..(14): Norleucine
  C-term NH2
LTFAAYWAQLAAXLA

SEQ ID NO: 429 - protein, 15 aa, Artificial Sequence
  Description of Artificial Sequence: Synthetic peptide
  N-term Ac
  MOD_RES (4)..(4): Alpha-Me R8-octenyl-alanine olefin amino acid connected by an all-carbon crosslinker comprising one double bond
  misc_feature (4)..(11): Crosslink between residues
  MOD_RES (11)..(11): Alpha-Me S5-pentenyl-alanine olefin amino acid connected by an all-carbon crosslinker comprising one double bond
  MOD_RES (14)..(14): Norleucine
  C-term OH
LTFAAYWAQLAAALA

SEQ ID NO: 430 - protein, 15 aa, Artificial Sequence
  Description of Artificial Sequence: Synthetic peptide
  N-term Ac
  MOD_RES (4)..(4): Alpha-Me R8-octenyl-alanine olefin amino acid connected by an all-carbon crosslinker comprising one double bond
  misc_feature (4)..(11): Crosslink between residues
  MOD_RES (11)..(11): Alpha-Me S5-pentenyl-alanine olefin amino acid connected by an all-carbon crosslinker comprising one double bond
  MOD_RES (14)..(14): Norleucine
  C-term OH
LTFAAYWAQLAAALA

SEQ ID NO: 431 - protein, 15 aa, Artificial Sequence
  Description of Artificial Sequence: Synthetic peptide
  N-term Ac
  MOD_RES (4)..(4): Alpha-Me R8-octenyl-alanine olefin amino acid connected by an all-carbon crosslinker comprising one double bond
  misc_feature (4)..(11): Crosslink between residues
  MOD_RES (11)..(11): Alpha-Me S5-pentenyl-alanine olefin amino acid connected by an all-carbon crosslinker comprising one double bond
  MOD_RES (14)..(14): Norleucine
  C-term NHnPr
LTFAAYWAQLAAALA

SEQ ID NO: 432 - protein, 15 aa, Artificial Sequence
  Description of Artificial Sequence: Synthetic peptide
  N-term Ac
  MOD_RES (4)..(4): Alpha-Me R8-octenyl-alanine olefin amino acid connected by an all-carbon crosslinker comprising one double bond
  misc_feature (4)..(11): Crosslink between residues
  MOD_RES (11)..(11): Alpha-Me S5-pentenyl-alanine olefin amino acid connected by an all-carbon crosslinker comprising one double bond
  MOD_RES (14)..(14): Norleucine
  C-term NHnPr
LTFAAYWAQLAAALA

SEQ ID NO: 433 - protein, 15 aa, Artificial Sequence
  Description of Artificial Sequence: Synthetic peptide
  N-term Ac
  MOD_RES (4)..(4): Alpha-Me R8-octenyl-alanine olefin amino acid connected by an all-carbon crosslinker comprising one double bond
  misc_feature (4)..(11): Crosslink between residues
  MOD_RES (11)..(11): Alpha-Me S5-pentenyl-alanine olefin amino acid connected by an all-carbon crosslinker comprising one double bond
  MOD_RES (14)..(14): Norleucine
  C-term NHnBu33Me
LTFAAYWAQLAAALA

SEQ ID NO: 434 - protein, 15 aa, Artificial Sequence
  Description of Artificial Sequence: Synthetic peptide
  N-term Ac
  MOD_RES (4)..(4): Alpha-Me R8-octenyl-alanine olefin amino acid connected by an all-carbon crosslinker comprising one double bond
  misc_feature (4)..(11): Crosslink between residues
  MOD_RES (11)..(11): Alpha-Me S5-pentenyl-alanine olefin amino acid connected by an all-carbon crosslinker comprising one double bond
  MOD_RES (14)..(14): Norleucine
  C-term NHnBu33Me
LTFAAYWAQLAAALA

SEQ ID NO: 435 - protein, 15 aa, Artificial Sequence
  Description of Artificial Sequence: Synthetic peptide
  N-term Ac
  MOD_RES (4)..(4): Alpha-Me R8-octenyl-alanine olefin amino acid connected by an all-carbon crosslinker comprising one double bond
  misc_feature (4)..(11): Crosslink between residues
  MOD_RES (11)..(11): Alpha-Me S5-pentenyl-alanine olefin amino acid connected by an all-carbon crosslinker comprising one double bond
  MOD_RES (14)..(14): Norleucine
  C-term NHHex
LTFAAYWAQLAAALA

SEQ ID NO: 436 - protein, 15 aa, Artificial Sequence
  Description of Artificial Sequence: Synthetic peptide
  N-term Ac
  MOD_RES (4)..(4): Alpha-Me R8-octenyl-alanine olefin amino acid connected by an all-carbon crosslinker comprising one double bond
  misc_feature (4)..(11): Crosslink between residues
  MOD_RES (11)..(11): Alpha-Me S5-pentenyl-alanine olefin amino acid connected by an all-carbon crosslinker comprising one double bond
  MOD_RES (14)..(14): Norleucine
  C-term NHHex
LTFAAYWAQLAAALA

SEQ ID NO: 437 - protein, 15 aa, Artificial Sequence
  Description of Artificial Sequence: Synthetic peptide
  N-term Ac
  MOD_RES (4)..(4): Alpha-Me R8-octenyl-alanine olefin amino acid connected by an all-carbon crosslinker comprising one double bond
  misc_feature (4)..(11): Crosslink between residues
  MOD_RES (11)..(11): Alpha-Me S5-pentenyl-alanine olefin amino acid connected by an all-carbon crosslinker comprising one double bond
  MOD_RES (14)..(14): Norleucine
  C-term NH2
LTAAAYWAQLAAALA

SEQ ID NO: 438 - protein, 15 aa, Artificial Sequence
  Description of Artificial Sequence: Synthetic peptide
  N-term Ac
  MOD_RES (3)..(3): hLeu
  MOD_RES (4)..(4): Alpha-Me R8-octenyl-alanine olefin amino acid connected by an all-carbon crosslinker comprising one double bond
  misc_feature (4)..(11): Crosslink between residues
  MOD_RES (11)..(11): Alpha-Me S5-pentenyl-alanine olefin amino acid connected by an all-carbon crosslinker comprising one double bond
  MOD_RES (14)..(14): Norleucine
  C-term NH2
LTLAAYWAQLAAALA

SEQ ID NO: 439 - protein, 15 aa, Artificial Sequence
  Description of Artificial Sequence: Synthetic peptide
  N-term Ac
  MOD_RES (4)..(4): Alpha-Me R8-octenyl-alanine olefin amino acid connected by an all-carbon crosslinker comprising one double bond
  misc_feature (4)..(11): Crosslink between residues
  MOD_RES (11)..(11): Alpha-Me S5-pentenyl-alanine olefin amino acid connected by an all-carbon crosslinker comprising one double bond
  MOD_RES (14)..(14): Norleucine
  C-term NH2
LTFAAYAAQLAAALA

SEQ ID NO: 440 - protein, 15 aa, Artificial Sequence
  Description of Artificial Sequence: Synthetic peptide
  N-term Ac
  MOD_RES (4)..(4): Alpha-Me R8-octenyl-alanine olefin amino acid connected by an all-carbon crosslinker comprising one double bond
  misc_feature (4)..(11): Crosslink between residues
  MOD_RES (7)..(7): 2-Naphthalanine
  MOD_RES (11)..(11): Alpha-Me S5-pentenyl-alanine olefin amino acid connected by an all-carbon crosslinker comprising one double bond
  MOD_RES (14)..(14): Norleucine
  C-term NH2
LTFAAYAAQLAAALA

SEQ ID NO: 441 - protein, 14 aa, Artificial Sequence
  Description of Artificial Sequence: Synthetic peptide
  N-term Ac
  MOD_RES (4)..(4): Alpha-Me R8-octenyl-alanine olefin amino acid connected by an all-carbon crosslinker comprising one double bond
  misc_feature (4)..(11): Crosslink between residues
  MOD_RES (8)..(8): Cou4
  MOD_RES (10)..(10): Cyclobutyl-Ala
  MOD_RES (11)..(11): Alpha-Me S5-pentenyl-alanine olefin amino acid connected by an all-carbon crosslinker comprising one double bond
  C-term NH2
LTFAEYWXQAASAA

SEQ ID NO: 442 - protein, 14 aa, Artificial Sequence
  Description of Artificial Sequence: Synthetic peptide
  N-term Ac
  MOD_RES (4)..(4): Alpha-Me R8-octenyl-alanine olefin amino acid connected by an all-carbon crosslinker comprising one double bond
  misc_feature (4)..(11): Crosslink between residues
  MOD_RES (8)..(8): Cou7
  MOD_RES (10)..(10): Cyclobutyl-Ala
  MOD_RES (11)..(11): Alpha-Me S5-pentenyl-alanine olefin amino acid connected by an all-carbon crosslinker comprising one double bond
  C-term NH2
LTFAEYWXQAASAA

SEQ ID NO: 443 - protein, 14 aa, Artificial Sequence
  Description of Artificial Sequence: Synthetic peptide
  N-term Ac
  MOD_RES (4)..(4): Alpha-Me R8-octenyl-alanine olefin amino acid connected by an all-carbon crosslinker comprising no double bonds
  misc_feature (4)..(11): Crosslink between residues
  MOD_RES (10)..(10): Cyclobutyl-Ala
  MOD_RES (11)..(11): Alpha-Me S5-pentenyl-alanine olefin amino acid connected by an all-carbon saturated crosslinker comprising no double bonds
  C-term NH2
LTFAEYWAQAASAA

SEQ ID NO: 444 - protein, 14 aa, Artificial Sequence
  Description of Artificial Sequence: Synthetic peptide
  N-term Dmaac
  MOD_RES (4)..(4): Alpha-Me R8-octenyl-alanine olefin amino acid connected by an all-carbon crosslinker comprising one double bond
  misc_feature (4)..(11): Crosslink between residues
  MOD_RES (10)..(10): Cyclobutyl-Ala
  MOD_RES (11)..(11): Alpha-Me S5-pentenyl-alanine olefin amino acid connected by an all-carbon crosslinker comprising one double bond
  C-term NH2
LTFAEYWAQAASAA

SEQ ID NO: 445 - protein, 17 aa, Artificial Sequence
  Description of Artificial Sequence: Synthetic peptide
  N-term Dmaac
  MOD_RES (4)..(4): Alpha-Me R8-octenyl-alanine olefin amino acid connected by an all-carbon crosslinker comprising one double bond
  misc_feature (4)..(11): Crosslink between residues
  MOD_RES (11)..(11): Alpha-Me S5-pentenyl-alanine olefin amino acid connected by an all-carbon crosslinker comprising one double bond
  MOD_RES (17)..(17): D-amino acid
  C-term NH2
LTFAAYWAQLAAAAAAA

SEQ ID NO: 446 - protein, 17 aa, Artificial Sequence
  Description of Artificial Sequence: Synthetic peptide
  N-term Dmaac
  MOD_RES (4)..(4): Alpha-Me R8-octenyl-alanine olefin amino acid connected by an all-carbon crosslinker comprising one double bond
  misc_feature (4)..(11): Crosslink between residues
  MOD_RES (11)..(11): Alpha-Me S5-pentenyl-alanine olefin amino acid connected by an all-carbon crosslinker comprising one double bond
  MOD_RES (17)..(17): D-amino acid
  C-term NH2
LTFAAYWAQLAAAAAAA

SEQ ID NO: 447 - protein, 17 aa, Artificial Sequence
  Description of Artificial Sequence: Synthetic peptide
  N-term Dmaac
  MOD_RES (4)..(4): Alpha-Me R8-octenyl-alanine olefin amino acid connected by an all-carbon crosslinker comprising one double bond
  misc_feature (4)..(11): Crosslink between residues
  MOD_RES (11)..(11): Alpha-Me S5-pentenyl-alanine olefin amino acid connected by an all-carbon crosslinker comprising one double bond
  MOD_RES (17)..(17): D-amino acid
  C-term NH2
LTFAEYWAQLAAAAAAA

SEQ ID NO: 448 - protein, 17 aa, Artificial Sequence
  Description of Artificial Sequence: Synthetic peptide
  N-term Dmaac
  MOD_RES (4)..(4): Alpha-Me R8-octenyl-alanine olefin amino acid connected by an all-carbon crosslinker comprising one double bond
  misc_feature (4)..(11): Crosslink between residues
  MOD_RES (11)..(11): Alpha-Me S5-pentenyl-alanine olefin amino acid connected by an all-carbon crosslinker comprising one double bond
  MOD_RES (17)..(17): D-amino acid
  C-term NH2
LTFAEYWAQLAAAAAAA

SEQ ID NO: 449 - protein, 15 aa, Artificial Sequence
  Description of Artificial Sequence: Synthetic peptide
  N-term Dmaac
  MOD_RES (4)..(4): Alpha-Me R8-octenyl-alanine olefin amino acid connected by an all-carbon crosslinker comprising one double bond
  misc_feature (4)..(11): Crosslink between residues
  MOD_RES (6)..(6): 4-carboxy Phe
  MOD_RES (10)..(10): Cyclobutyl-Ala
  MOD_RES (11)..(11): Alpha-Me S5-pentenyl-alanine olefin amino acid connected by an all-carbon crosslinker comprising one double bond
  MOD_RES (15)..(15): D-amino acid
  C-term NH2
LTFAEFWAQAAAAIA

SEQ ID NO: 450 - protein, 15 aa, Artificial Sequence
  Description of Artificial Sequence: Synthetic peptide
  N-term Dmaac
  MOD_RES (4)..(4): Alpha-Me R8-octenyl-alanine olefin amino acid connected by an all-carbon crosslinker comprising one double bond
  misc_feature (4)..(11): Crosslink between residues
  MOD_RES (6)..(6): 4-carboxy Phe
  MOD_RES (10)..(10): Cyclobutyl-Ala
  MOD_RES (11)..(11): Alpha-Me S5-pentenyl-alanine olefin amino acid connected by an all-carbon crosslinker comprising one double bond
  MOD_RES (15)..(15): D-amino acid
  C-term NH2
LTFAEFWAQAAAAIA

SEQ ID NO: 451 - protein, 15 aa, Artificial Sequence
  Description of Artificial Sequence: Synthetic peptide
  N-term Dmaac
  MOD_RES (4)..(4): Alpha-Me R8-octenyl-alanine olefin amino acid connected by an all-carbon crosslinker comprising one double bond
  misc_feature (4)..(11): Crosslink between residues
  MOD_RES (11)..(11): Alpha-Me S5-pentenyl-alanine olefin amino acid connected by an all-carbon crosslinker comprising one double bond
  MOD_RES (14)..(14): Norleucine
  C-term NH2
LTFAAYWAQLAAALA

SEQ ID NO: 452 - protein, 15 aa, Artificial Sequence
  Description of Artificial Sequence: Synthetic peptide
  N-term Dmaac
  MOD_RES (4)..(4): Alpha-Me R8-octenyl-alanine olefin amino acid connected by an all-carbon crosslinker comprising one double bond
  misc_feature (4)..(11): Crosslink between residues
  MOD_RES (11)..(11): Alpha-Me S5-pentenyl-alanine olefin amino acid connected by an all-carbon crosslinker comprising one double bond
  MOD_RES (14)..(14): Norleucine
  C-term NH2
LTFAAYWAQLAAALA

SEQ ID NO: 453 - protein, 15 aa, Artificial Sequence
  Description of Artificial Sequence: Synthetic peptide
  N-term Ac
  MOD_RES (4)..(4): Alpha-Me R8-octenyl-alanine olefin amino acid connected by an all-carbon crosslinker comprising no double bonds
  misc_feature (4)..(11): Crosslink between residues
  MOD_RES (11)..(11): Alpha-Me S5-pentenyl-alanine olefin amino acid connected by an all-carbon crosslinker comprising no double bonds
  MOD_RES (14)..(14): Norleucine
  C-term NH2
LTFAAYWAQLAAALA

SEQ ID NO: 454 - protein, 17 aa, Artificial Sequence
  Description of Artificial Sequence: Synthetic peptide
  N-term Ac
  MOD_RES (4)..(4): Alpha-Me R8-octenyl-alanine olefin amino acid connected by an all-carbon crosslinker comprising no double bonds
  misc_feature (4)..(11): Crosslink between residues
  MOD_RES (11)..(11): Alpha-Me S5-pentenyl-alanine olefin amino acid connected by an all-carbon crosslinker comprising no double bonds
  MOD_RES (17)..(17): D-amino acid
  C-term NH2
LTFAEYWAQLAAAAAAA

SEQ ID NO: 455 - protein, 16 aa, Artificial Sequence
  Description of Artificial Sequence: Synthetic peptide
  MOD_RES (1)..(1): Cou6
  MOD_RES (2)..(2): Beta-Ala
  MOD_RES (6)..(6): Alpha-Me R8-octenyl-alanine olefin amino acid connected by an all-carbon crosslinker comprising one double bond
  misc_feature (6)..(13): Crosslink between residues
  MOD_RES (12)..(12): hLeu
  MOD_RES (13)..(13): Alpha-Me S5-pentenyl-alanine olefin amino acid connected by an all-carbon crosslinker comprising one double bond
  C-term NH2
XALTFAEYWAQLASAA

SEQ ID NO: 456 - protein, 16 aa, Artificial Sequence
  Description of Artificial Sequence: Synthetic peptide
  MOD_RES (1)..(1): Cou8
  MOD_RES (2)..(2): Beta-Ala
  MOD_RES (6)..(6): Alpha-Me R8-octenyl-alanine olefin amino acid connected by an all-carbon crosslinker comprising one double bond
  misc_feature (6)..(13): Crosslink between residues
  MOD_RES (12)..(12): hLeu
  MOD_RES (13)..(13): Alpha-Me S5-pentenyl-alanine olefin amino acid connected by an all-carbon crosslinker comprising one double bond
  C-term NH2
XALTFAEYWAQLASAA

SEQ ID NO: 457 - protein, 17 aa, Artificial Sequence
  Description of Artificial Sequence: Synthetic peptide
  N-term Ac
  MOD_RES (3)..(3): 4-iodo-Phe
  MOD_RES (4)..(4): Alpha-Me R8-octenyl-alanine olefin amino acid connected by an all-carbon crosslinker comprising one double bond
  misc_feature (4)..(11): Crosslink between residues
  MOD_RES (11)..(11): Alpha-Me S5-pentenyl-alanine olefin amino acid connected by an all-carbon crosslinker comprising one double bond
  MOD_RES (17)..(17): D-amino acid
  C-term NH2
LTFAEYWAQLAAAAAAA

SEQ ID NO: 458 - protein, 17 aa, Artificial Sequence
  Description of Artificial Sequence: Synthetic peptide
  N-term Ac
  MOD_RES (4)..(4): Alpha-Me R8-octenyl-alanine olefin amino acid connected by an all-carbon crosslinker comprising one double bond
  misc_feature (4)..(11): Crosslink between residues
  MOD_RES (11)..(11): Alpha-Me S5-pentenyl-alanine olefin amino acid connected by an all-carbon crosslinker comprising one double bond
  MOD_RES (17)..(17): D-amino acid
  C-term NH2
LTFAEYWAQLAAAAAAA

SEQ ID NO: 459 - protein, 17 aa, Artificial Sequence
  Description of Artificial Sequence: Synthetic peptide
  N-term Ac
  MOD_RES (4)..(4): Alpha-Me R8-octenyl-alanine olefin amino acid connected by an all-carbon crosslinker comprising one double bond
  misc_feature (4)..(11): Crosslink between residues
  MOD_RES (11)..(11): Alpha-Me S5-pentenyl-alanine olefin amino acid connected by an all-carbon crosslinker comprising one double bond
  MOD_RES (17)..(17): D-amino acid
  C-term OH
LTFAEYWAQLAAAAAAA

SEQ ID NO: 460 - protein, 17 aa, Artificial Sequence
  Description of Artificial Sequence: Synthetic peptide
  N-term Ac
  MOD_RES (4)..(4): Alpha-Me R8-octenyl-alanine olefin amino acid connected by an all-carbon crosslinker comprising one double bond
  misc_feature (4)..(11): Crosslink between residues
  MOD_RES (11)..(11): Alpha-Me S5-pentenyl-alanine olefin amino acid connected by an all-carbon crosslinker comprising one double bond
  MOD_RES (17)..(17): D-amino acid
  C-term OH
LTFAEYWAQLAAAAAAA

SEQ ID NO: 461 - protein, 17 aa, Artificial Sequence
  Description of Artificial Sequence: Synthetic peptide
  N-term Ac
  MOD_RES (4)..(4): Alpha-Me R8-octenyl-alanine olefin amino acid connected by an all-carbon crosslinker comprising one double bond
  misc_feature (4)..(11): Crosslink between residues
  MOD_RES (11)..(11): Alpha-Me S5-pentenyl-alanine olefin amino acid connected by an all-carbon crosslinker comprising one double bond
  MOD_RES (17)..(17): D-amino acid
  C-term NH2
LTFAEYWAELAAAAAAA

SEQ ID NO: 462 - protein, 17 aa, Artificial Sequence
  Description of Artificial Sequence: Synthetic peptide
  N-term Ac
  MOD_RES (4)..(4): Alpha-Me R8-octenyl-alanine olefin amino acid connected by an all-carbon crosslinker comprising one double bond
  misc_feature (4)..(11): Crosslink between residues
  MOD_RES (11)..(11): Alpha-Me S5-pentenyl-alanine olefin amino acid connected by an all-carbon crosslinker comprising one double bond
  MOD_RES (17)..(17): D-amino acid
  C-term NH2
LTFAEYWAELAAAAAAA

SEQ ID NO: 463 - protein, 17 aa, Artificial Sequence
  Description of Artificial Sequence: Synthetic peptide
  N-term Ac
  MOD_RES (4)..(4): Alpha-Me R8-octenyl-alanine olefin amino acid connected by an all-carbon crosslinker comprising one double bond
  misc_feature (4)..(11): Crosslink between residues
  MOD_RES (11)..(11): Alpha-Me S5-pentenyl-alanine olefin amino acid connected by an all-carbon crosslinker comprising one double bond
  MOD_RES (17)..(17): D-amino acid
  C-term OH
LTFAEYWAELAAAAAAA

SEQ ID NO: 464 - protein, 17 aa, Artificial Sequence
  Description of Artificial Sequence: Synthetic peptide
  N-term Ac
  MOD_RES (4)..(4): Alpha-Me R8-octenyl-alanine olefin amino acid connected by an all-carbon crosslinker comprising one double bond
  misc_feature (4)..(11): Crosslink between residues
  MOD_RES (7)..(7): 6cl-Trp
  MOD_RES (11)..(11): Alpha-Me S5-pentenyl-alanine olefin amino acid connected by an all-carbon crosslinker comprising one double bond
  MOD_RES (17)..(17): D-amino acid
  C-term NH2
LTFAEYWAQLAAAAAAA

SEQ ID NO: 465 - protein, 17 aa, Artificial Sequence
  Description of Artificial Sequence: Synthetic peptide
  N-term Ac
  MOD_RES (4)..(4): Alpha-Me R8-octenyl-alanine olefin amino acid connected by an all-carbon crosslinker comprising one double bond
  misc_feature (4)..(11): Crosslink between residues
  MOD_RES (6)..(6): Phe-4bOH2
  MOD_RES (11)..(11): Alpha-Me S5-pentenyl-alanine olefin amino acid connected by an all-carbon crosslinker comprising one double bond
  MOD_RES (17)..(17): D-amino acid
  C-term NH2
LTFAEFWAQLAAAAAAA

SEQ ID NO: 466 - protein, 20 aa, Artificial Sequence
  Description of Artificial Sequence: Synthetic peptide
  N-term Ac
  MOD_RES (7)..(7): Alpha-Me R8-octenyl-alanine olefin amino acid connected by an all-carbon crosslinker comprising one double bond
  misc_feature (7)..(14): Crosslink between residues
  MOD_RES (14)..(14): Alpha-Me S5-pentenyl-alanine olefin amino acid connected by an all-carbon crosslinker comprising one double bond
  MOD_RES (20)..(20): D-amino acid
  C-term NH2
AAALTFAEYWAQLAAAAAAA

SEQ ID NO: 467 - protein, 17 aa, Artificial Sequence
  Description of Artificial Sequence: Synthetic peptide
  N-term Ac
  MOD_RES (3)..(3): 3,4-difluoro Phe
  MOD_RES (4)..(4): Alpha-Me R8-octenyl-alanine olefin amino acid connected by an all-carbon crosslinker comprising one double bond
  misc_feature (4)..(11): Crosslink between residues
  MOD_RES (11)..(11): Alpha-Me S5-pentenyl-alanine olefin amino acid connected by an all-carbon crosslinker comprising one double bond
  MOD_RES (17)..(17): D-amino acid
  C-term NH2
LTFAEYWAQLAAAAAAA

SEQ ID NO: 468 - protein, 17 aa, Artificial Sequence
  Description of Artificial Sequence: Synthetic peptide
  N-term Ac
  MOD_RES (4)..(4): Alpha-Me R8-octenyl-alanine olefin amino acid connected by an all-carbon crosslinker comprising one double bond
  misc_feature (4)..(11): Crosslink between residues
  MOD_RES (11)..(11): Alpha-Me S5-pentenyl-alanine olefin amino acid connected by an all-carbon crosslinker comprising one double bond
  MOD_RES (17)..(17): D-amino acid
  C-term NH2
RTFAEYWAQLAAAAAAA

SEQ ID NO: 469 - protein, 17 aa, Artificial Sequence
  Description of Artificial Sequence: Synthetic peptide
  N-term Ac
  MOD_RES (4)..(4): Alpha-Me R8-octenyl-alanine olefin amino acid connected by an all-carbon crosslinker comprising one double bond
  misc_feature (4)..(11): Crosslink between residues
  MOD_RES (11)..(11): Alpha-Me S5-pentenyl-alanine olefin amino acid connected by an all-carbon crosslinker comprising one double bond
  MOD_RES (17)..(17): D-amino acid
  C-term NH2
LTAAEYWAQLAAAAAAA

SEQ ID NO: 470 - protein, 17 aa, Artificial Sequence
  Description of Artificial Sequence: Synthetic peptide
  N-term Ac
  MOD_RES (4)..(4): Alpha-Me R8-octenyl-alanine olefin amino acid connected by an all-carbon crosslinker comprising one double bond
  misc_feature (4)..(11): Crosslink between residues
  MOD_RES (8)..(8): 2-aminoisobutyric acid
  MOD_RES (11)..(11): Alpha-Me S5-pentenyl-alanine olefin amino acid connected by an all-carbon crosslinker comprising one double bond
  MOD_RES (17)..(17): D-amino acid
  C-term NH2
LTFAEYWXQLAAAAAAA

SEQ ID NO: 471 - protein, 17 aa, Artificial Sequence
  Description of Artificial Sequence: Synthetic peptide
  N-term Ac
  MOD_RES (4)..(4): Alpha-Me R8-octenyl-alanine olefin amino acid connected by an all-carbon crosslinker comprising one double bond
  misc_feature (4)..(11): Crosslink between residues
  MOD_RES (11)..(11): Alpha-Me S5-pentenyl-alanine olefin amino acid connected by an all-carbon crosslinker comprising one double bond
  MOD_RES (13)..(13): 2-aminoisobutyric acid
  MOD_RES (17)..(17): D-amino acid
  C-term NH2
LTFAEYWAQLAAXAAAA

SEQ ID NO: 472 - protein, 17 aa, Artificial Sequence
  Description of Artificial Sequence: Synthetic peptide
  N-term Ac
  MOD_RES (4)..(4): Alpha-Me R8-octenyl-alanine olefin amino acid connected by an all-carbon crosslinker comprising one double bond
  misc_feature (4)..(11): Crosslink between residues
  MOD_RES (11)..(11): Alpha-Me S5-pentenyl-alanine olefin amino acid connected by an all-carbon crosslinker comprising one double bond
  MOD_RES (14)..(14): 2-aminoisobutyric acid
  MOD_RES (17)..(17): D-amino acid
  C-term NH2
LTFAEYWAQLAAAXAAA

SEQ ID NO: 473 - protein, 17 aa, Artificial Sequence
  Description of Artificial Sequence: Synthetic peptide
  N-term Ac
  MOD_RES (4)..(4): Alpha-Me R8-octenyl-alanine olefin amino acid connected by an all-carbon crosslinker comprising one double bond
  misc_feature (4)..(11): Crosslink between residues
  MOD_RES (11)..(11): Alpha-Me S5-pentenyl-alanine olefin amino acid connected by an all-carbon crosslinker comprising one double bond
  MOD_RES (15)..(15): 2-aminoisobutyric acid
  MOD_RES (17)..(17): D-amino acid
  C-term NH2
LTFAEYWAQLAAAAXAA

SEQ ID NO: 474 - protein, 17 aa, Artificial Sequence
  Description of Artificial Sequence: Synthetic peptide
  N-term Ac
  MOD_RES (4)..(4): Alpha-Me R8-octenyl-alanine olefin amino acid connected by an all-carbon crosslinker comprising one double bond
  misc_feature (4)..(11): Crosslink between residues
  MOD_RES (11)..(11): Alpha-Me S5-pentenyl-alanine olefin amino acid connected by an all-carbon crosslinker comprising one double bond
  MOD_RES (16)..(16): 2-aminoisobutyric acid
  MOD_RES (17)..(17): D-amino acid
  C-term NH2
LTFAEYWAQLAAAAAXA

SEQ ID NO: 475 - protein, 17 aa, Artificial Sequence
  Description of Artificial Sequence: Synthetic peptide
  N-term Ac
  MOD_RES (4)..(4): Alpha-Me R8-octenyl-alanine olefin amino acid connected by an all-carbon crosslinker comprising one double bond
  misc_feature (4)..(11): Crosslink between residues
  MOD_RES (11)..(11): Alpha-Me S5-pentenyl-alanine olefin amino acid connected by an all-carbon crosslinker comprising one double bond
  MOD_RES (16)..(16): 2-aminoisobutyric acid
  MOD_RES (17)..(17): D-amino acid
  C-term NH2
LTFAEYWAQLAAAAAXA

SEQ ID NO: 476 - protein, 17 aa, Artificial Sequence
  Description of Artificial Sequence: Synthetic peptide
  N-term Ac
  MOD_RES (4)..(4): Alpha-Me R8-octenyl-alanine olefin amino acid connected by an all-carbon crosslinker comprising one double bond
  misc_feature (4)..(11): Crosslink between residues
  MOD_RES (11)..(11): Alpha-Me S5-pentenyl-alanine olefin amino acid connected by an all-carbon crosslinker comprising one double bond
  MOD_RES (17)..(17): 2-aminoisobutyric acid
  C-term NH2
LTFAEYWAQLAAAAAAX

SEQ ID NO: 477 - protein, 17 aa, Artificial Sequence
  Description of Artificial Sequence: Synthetic peptide
  N-term Ac
  MOD_RES (4)..(4): Alpha-Me R8-octenyl-alanine olefin amino acid connected by an all-carbon crosslinker comprising one double bond
  misc_feature (4)..(11): Crosslink between residues
  MOD_RES (11)..(11): Alpha-Me S5-pentenyl-alanine olefin amino acid connected by an all-carbon crosslinker comprising one double bond
  MOD_RES (13)..(13): D-amino acid
  MOD_RES (17)..(17): D-amino acid
  C-term NH2
LTFAEYWAQLAAAAAAA

SEQ ID NO: 478 - protein, 17 aa, Artificial Sequence
  Description of Artificial Sequence: Synthetic peptide
  N-term Ac
  MOD_RES (4)..(4): Alpha-Me R8-octenyl-alanine olefin amino acid connected by an all-carbon crosslinker comprising one double bond
  misc_feature (4)..(11): Crosslink between residues
  MOD_RES (11)..(11): Alpha-Me S5-pentenyl-alanine olefin amino acid connected by an all-carbon crosslinker comprising one double bond
  MOD_RES (14)..(14): D-amino acid
  MOD_RES (17)..(17): D-amino acid
  C-term NH2
LTFAEYWAQLAAAAAAA

SEQ ID NO: 479 - protein, 17 aa, Artificial Sequence
  Description of Artificial Sequence: Synthetic peptide
  N-term Ac
  MOD_RES (4)..(4): Alpha-Me R8-octenyl-alanine olefin amino acid connected by an all-carbon crosslinker comprising one double bond
  misc_feature (4)..(11): Crosslink between residues
  MOD_RES (11)..(11): Alpha-Me S5-pentenyl-alanine olefin amino acid connected by an all-carbon crosslinker comprising one double bond
  MOD_RES (15)..(15): D-amino acid
  MOD_RES (17)..(17): D-amino acid
  C-term NH2
LTFAEYWAQLAAAAAAA

SEQ ID NO: 480 - protein, 17 aa, Artificial Sequence
  Description of Artificial Sequence: Synthetic peptide
  N-term Ac
  MOD_RES (4)..(4): Alpha-Me R8-octenyl-alanine olefin amino acid connected by an all-carbon crosslinker comprising one double bond
  misc_feature (4)..(11): Crosslink between residues
  MOD_RES (11)..(11): Alpha-Me S5-pentenyl-alanine olefin amino acid connected by an all-carbon crosslinker comprising one double bond
  MOD_RES (15)..(15): D-amino acid
  MOD_RES (17)..(17): D-amino acid
  C-term NH2
LTFAEYWAQLAAAAAAA

SEQ ID NO: 481 - protein, 17 aa, Artificial Sequence
  Description of Artificial Sequence: Synthetic peptide
  N-term Ac
  MOD_RES (4)..(4): Alpha-Me R8-octenyl-alanine olefin amino acid connected by an all-carbon crosslinker comprising one double bond
  misc_feature (4)..(11): Crosslink between residues
  MOD_RES (11)..(11): Alpha-Me S5-pentenyl-alanine olefin amino acid connected by an all-carbon crosslinker comprising one double bond
  MOD_RES (16)..(17): D-amino acid
  C-term NH2
LTFAEYWAQLAAAAAAA

SEQ ID NO: 482 - protein, 17 aa, Artificial Sequence
  Description of Artificial Sequence: Synthetic peptide
  N-term Ac
  MOD_RES (4)..(4): Alpha-Me R8-octenyl-alanine olefin amino acid connected by an all-carbon crosslinker comprising one double bond
  misc_feature (4)..(11): Crosslink between residues
  MOD_RES (11)..(11): Alpha-Me S5-pentenyl-alanine olefin amino acid connected by an all-carbon crosslinker comprising one double bond
  C-term NH2
LTFAEYWAQLAAAAAAA

SEQ ID NO: 483 - protein, 17 aa, Artificial Sequence
  Description of Artificial Sequence: Synthetic peptide
  N-term Ac
  MOD_RES (4)..(4): Alpha-Me R8-octenyl-alanine olefin amino acid connected by an all-carbon crosslinker comprising one double bond
  misc_feature (4)..(11): Crosslink between residues
  MOD_RES (11)..(11): Alpha-Me S5-pentenyl-alanine olefin amino acid connected by an all-carbon crosslinker comprising one double bond
  MOD_RES (13)..(13): Sarcosine
  MOD_RES (17)..(17): D-amino acid
  C-term NH2
LTFAEYWAQLAAXAAAA

SEQ ID NO: 484 - protein, 17 aa, Artificial Sequence
  Description of Artificial Sequence: Synthetic peptide
  N-term Ac
  MOD_RES (4)..(4): Alpha-Me R8-octenyl-alanine olefin amino acid connected by an all-carbon crosslinker comprising one double bond
  misc_feature (4)..(11): Crosslink between residues
  MOD_RES (11)..(11): Alpha-Me S5-pentenyl-alanine olefin amino acid connected by an all-carbon crosslinker comprising one double bond
  MOD_RES (14)..(14): Sarcosine
  MOD_RES (17)..(17): D-amino acid
  C-term NH2
LTFAEYWAQLAAAXAAA

SEQ ID NO: 485 - protein, 17 aa, Artificial Sequence
  Description of Artificial Sequence: Synthetic peptide
  N-term Ac
  MOD_RES (4)..(4): Alpha-Me R8-octenyl-alanine olefin amino acid connected by an all-carbon crosslinker comprising one double bond
  misc_feature (4)..(11): Crosslink between residues
  MOD_RES (11)..(11): Alpha-Me S5-pentenyl-alanine olefin amino acid connected by an all-carbon crosslinker comprising one double bond
  MOD_RES (15)..(15): Sarcosine
  MOD_RES (17)..(17): D-amino acid
  C-term NH2
LTFAEYWAQLAAAAXAA

SEQ ID NO: 486 - protein, 17 aa, Artificial Sequence
  Description of Artificial Sequence: Synthetic peptide
  N-term Ac
  MOD_RES (4)..(4): Alpha-Me R8-octenyl-alanine olefin amino acid connected by an all-carbon crosslinker comprising one double bond
  misc_feature (4)..(11): Crosslink between residues
  MOD_RES (11)..(11): Alpha-Me S5-pentenyl-alanine olefin amino acid connected by an all-carbon crosslinker comprising one double bond
  MOD_RES (16)..(16): Sarcosine
  MOD_RES (17)..(17): D-amino acid
  C-term NH2
LTFAEYWAQLAAAAAXA

SEQ ID NO: 487 - protein, 17 aa, Artificial Sequence
  Description of Artificial Sequence: Synthetic peptide
  N-term Ac
  MOD_RES (4)..(4): Alpha-Me R8-octenyl-alanine olefin amino acid connected by an all-carbon crosslinker comprising one double bond
  misc_feature (4)..(11): Crosslink between residues
  MOD_RES (11)..(11): Alpha-Me S5-pentenyl-alanine olefin amino acid connected by an all-carbon crosslinker comprising one double bond
  MOD_RES (17)..(17): Sarcosine
  C-term NH2
LTFAEYWAQLAAAAAAX

SEQ ID NO: 488 - protein, 17 aa, Artificial Sequence
  Description of Artificial Sequence: Synthetic peptide
  N-term Ac
  MOD_RES (1)..(1): N15 isotopic-Leu
  MOD_RES (4)..(4): Alpha-Me R8-octenyl-alanine olefin amino acid connected by an all-carbon crosslinker comprising one double bond
  misc_feature (4)..(11): Crosslink between residues
  MOD_RES (11)..(11): Alpha-Me S5-pentenyl-alanine olefin amino acid connected by an all-carbon crosslinker comprising one double bond
  MOD_RES (17)..(17): D-amino acid
  C-term NH2
LTFAEYWAQLAAAAAAA

SEQ ID NO: 489 - protein, 16 aa, Artificial Sequence
  Description of Artificial Sequence: Synthetic peptide
  N-term Ac
  MOD_RES (3)..(3): Alpha-Me R8-octenyl-alanine olefin amino acid connected by an all-carbon crosslinker comprising one double bond
  misc_feature (3)..(10): Crosslink between residues
  MOD_RES (10)..(10): Alpha-Me S5-pentenyl-alanine olefin amino acid connected by an all-carbon crosslinker comprising one double bond
  MOD_RES (16)..(16): D-amino acid
  C-term NH2
TFAEYWAQLAAAAAAA

SEQ ID NO: 490 - protein, 15 aa, Artificial Sequence
  Description of Artificial Sequence: Synthetic peptide
  N-term Ac
  MOD_RES (2)..(2): Alpha-Me R8-octenyl-alanine olefin amino acid connected by an all-carbon crosslinker comprising one double bond
  misc_feature (2)..(9): Crosslink between residues
  MOD_RES (9)..(9): Alpha-Me S5-pentenyl-alanine olefin amino acid connected by an all-carbon crosslinker comprising one double bond
  MOD_RES (15)..(15): D-amino acid
  C-term NH2
FAEYWAQLAAAAAAA

SEQ ID NO: 491 - protein, 17 aa, Artificial Sequence
  Description of Artificial Sequence: Synthetic peptide
  N-term Ac
  MOD_RES (4)..(4): Alpha-Me R8-octenyl-alanine olefin amino acid connected by an all-carbon crosslinker comprising one double bond
  misc_feature (4)..(11): Crosslink between residues
  MOD_RES (11)..(11): Alpha-Me S5-pentenyl-alanine olefin amino acid connected by an all-carbon crosslinker comprising one double bond
  MOD_RES (17)..(17): D-amino acid
  C-term NH2
LVFAEYWAQLAAAAAAA

SEQ ID NO: 492 - protein, 17 aa, Artificial Sequence
  Description of Artificial Sequence: Synthetic peptide
  N-term Ac
  MOD_RES (4)..(4): Alpha-Me R8-octenyl-alanine olefin amino acid connected by an all-carbon crosslinker comprising one double bond
  misc_feature (4)..(11): Crosslink between residues
  MOD_RES (11)..(11): Alpha-Me S5-pentenyl-alanine olefin amino acid connected by an all-carbon crosslinker comprising one double bond
  MOD_RES (17)..(17): D-amino acid
  C-term NH2
AAFAEYWAQLAAAAAAA

SEQ ID NO: 493 - protein, 16 aa, Artificial Sequence
  Description of Artificial Sequence: Synthetic peptide
  N-term Ac
  MOD_RES (4)..(4): Alpha-Me R8-octenyl-alanine olefin amino acid connected by an all-carbon crosslinker comprising one double bond
  misc_feature (4)..(11): Crosslink between residues
  MOD_RES (11)..(11): Alpha-Me S5-pentenyl-alanine olefin amino acid connected by an all-carbon crosslinker comprising one double bond
  MOD_RES (16)..(16): D-amino acid
  C-term NH2
LTFAEYWAQLAAAAAA

SEQ ID NO: 494 - protein, 15 aa, Artificial Sequence
  Description of Artificial Sequence: Synthetic peptide
  N-term Ac
  MOD_RES (4)..(4): Alpha-Me R8-octenyl-alanine olefin amino acid connected by an all-carbon crosslinker comprising one double bond
  misc_feature (4)..(11): Crosslink between residues
  MOD_RES (11)..(11): Alpha-Me S5-pentenyl-alanine olefin amino acid connected by an all-carbon crosslinker comprising one double bond
  MOD_RES (15)..(15): D-amino acid
  C-term NH2
LTFAEYWAQLAAAAA

SEQ ID NO: 495 - protein, 14 aa, Artificial Sequence
  Description of Artificial Sequence: Synthetic peptide
  N-term Ac
  MOD_RES (4)..(4): Alpha-Me R8-octenyl-alanine olefin amino acid connected by an all-carbon crosslinker comprising one double bond
  misc_feature (4)..(11): Crosslink between residues
  MOD_RES (11)..(11): Alpha-Me S5-pentenyl-alanine olefin amino acid connected by an all-carbon crosslinker comprising one double bond
  MOD_RES (14)..(14): D-amino acid
  C-term NH2
LTFAEYWAQLAAAA

SEQ ID NO: 496 - protein, 13 aa, Artificial Sequence
  Description of Artificial Sequence: Synthetic peptide
  N-term Ac
  MOD_RES (4)..(4): Alpha-Me R8-octenyl-alanine olefin amino acid connected by an all-carbon crosslinker comprising one double bond
  misc_feature (4)..(11): Crosslink between residues
  MOD_RES (11)..(11): Alpha-Me S5-pentenyl-alanine olefin amino acid connected by an all-carbon crosslinker comprising one double bond
  MOD_RES (13)..(13): D-amino acid
  C-term NH2
LTFAEYWAQLAAA

SEQ ID NO: 497 - protein, 12 aa, Artificial Sequence
  Description of Artificial Sequence: Synthetic peptide
  N-term Ac
  MOD_RES (4)..(4): Alpha-Me R8-octenyl-alanine olefin amino acid connected by an all-carbon crosslinker comprising one double bond
  misc_feature (4)..(11): Crosslink between residues
  MOD_RES (11)..(11): Alpha-Me S5-pentenyl-alanine olefin amino acid connected by an all-carbon crosslinker comprising one double bond
  MOD_RES (12)..(12): D-amino acid
  C-term NH2
LTFAEYWAQLAA

SEQ ID NO: 498 - protein, 14 aa, Artificial Sequence
  Description of Artificial Sequence: Synthetic peptide
  N-term Ac
  MOD_RES (4)..(4): Alpha-Me R8-octenyl-alanine olefin amino acid connected by an all-carbon crosslinker comprising one double bond
  misc_feature (4)..(11): Crosslink between residues
  MOD_RES (11)..(11): Alpha-Me S5-pentenyl-alanine olefin amino acid connected by an all-carbon crosslinker comprising one double bond
  C-term OH
LTFAEYWAQLAAAA

SEQ ID NO: 499 - protein, 12 aa, Artificial Sequence
  Description of Artificial Sequence: Synthetic peptide
  N-term Ac
  MOD_RES (4)..(4): Alpha-Me R8-octenyl-alanine olefin amino acid connected by an all-carbon crosslinker comprising one double bond
  misc_feature (4)..(11): Crosslink between residues
  MOD_RES (11)..(11): Alpha-Me S5-pentenyl-alanine olefin amino acid connected by an all-carbon crosslinker comprising one double bond
  C-term OH
LTFAEYWAQLAA

SEQ ID NO: 500 - protein, 14 aa, Artificial Sequence
  Description of Artificial Sequence: Synthetic peptide
  N-term Ac
  MOD_RES (4)..(4): Alpha-Me R8-octenyl-alanine olefin amino acid connected by an all-carbon crosslinker comprising one double bond
  misc_feature (4)..(11): Crosslink between residues
  MOD_RES (11)..(11): Alpha-Me S5-pentenyl-alanine olefin amino acid connected by an all-carbon crosslinker comprising one double bond
  C-term NH2
LTFAEYWAQLAAAA

SEQ ID NO: 501 - protein, 14 aa, Artificial Sequence
  Description of Artificial Sequence: Synthetic peptide
  N-term Ac
  MOD_RES (4)..(4): Alpha-Me R8-octenyl-alanine olefin amino acid connected by an all-carbon crosslinker comprising one double bond
  misc_feature (4)..(11): Crosslink between residues
  MOD_RES (10)..(10): Cyclobutyl-Ala
  MOD_RES (11)..(11): Alpha-Me S5-pentenyl-alanine olefin amino acid connected by an all-carbon crosslinker comprising one double bond
  C-term OH
LTFAEYWAQAASAA

SEQ ID NO: 502 - protein, 12 aa, Artificial Sequence
  Description of Artificial Sequence: Synthetic peptide
  N-term Ac
  MOD_RES (4)..(4): Alpha-Me R8-octenyl-alanine olefin amino acid connected by an all-carbon crosslinker comprising one double bond
  misc_feature (4)..(11): Crosslink between residues
  MOD_RES (10)..(10): Cyclobutyl-Ala
  MOD_RES (11)..(11): Alpha-Me S5-pentenyl-alanine olefin amino acid connected by an all-carbon crosslinker comprising one double bond
  C-term OH
LTFAEYWAQAAS

SEQ ID NO: 503 - protein, 12 aa, Artificial Sequence
  Description of Artificial Sequence: Synthetic peptide
  N-term Ac
  MOD_RES (4)..(4): Alpha-Me R8-octenyl-alanine olefin amino acid connected by an all-carbon crosslinker comprising one double bond
  misc_feature (4)..(11): Crosslink between residues
  MOD_RES (10)..(10): Cyclobutyl-Ala
  MOD_RES (11)..(11): Alpha-Me S5-pentenyl-alanine olefin amino acid connected by an all-carbon crosslinker comprising one double bond
  C-term NH2
LTFAEYWAQAAS

SEQ ID NO: 504 - protein, 17 aa, Artificial Sequence
  Description of Artificial Sequence: Synthetic peptide
  N-term 4FBzl
  MOD_RES (4)..(4): Alpha-Me R8-octenyl-alanine olefin amino acid connected by an all-carbon crosslinker comprising one double bond
  misc_feature (4)..(11): Crosslink between residues
  MOD_RES (11)..(11): Alpha-Me S5-pentenyl-alanine olefin amino acid connected by an all-carbon crosslinker comprising one double bond
  MOD_RES (17)..(17): D-amino acid
  C-term NH2
LTFAEYWAQLAAAAAAA

SEQ ID NO: 505 - protein, 14 aa, Artificial Sequence
  Description of Artificial Sequence: Synthetic peptide
  N-term 4FBzl
  MOD_RES (4)..(4): Alpha-Me R8-octenyl-alanine olefin amino acid connected by an all-carbon crosslinker comprising one double bond
  misc_feature (4)..(11): Crosslink between residues
  MOD_RES (10)..(10): Cyclobutyl-Ala
  MOD_RES (11)..(11): Alpha-Me S5-pentenyl-alanine olefin amino acid connected by an all-carbon crosslinker comprising one double bond
  C-term NH2
LTFAEYWAQAASAA

SEQ ID NO: 506 - protein, 17 aa, Artificial Sequence
  Description of Artificial Sequence: Synthetic peptide
  N-term Ac
  MOD_RES (4)..(4): Alpha-Me R8-octenyl-alanine olefin amino acid connected by an all-carbon crosslinker comprising one double bond
  misc_feature (4)..(11): Crosslink between residues
  MOD_RES (11)..(11): Alpha-Me S5-pentenyl-alanine olefin amino acid connected by an all-carbon crosslinker comprising one double bond
  MOD_RES (17)..(17): D-amino acid
  C-term NH2
LTFARYWAQLAAAAAAA

SEQ ID NO: 507 - protein, 17 aa, Artificial Sequence
  Description of Artificial Sequence: Synthetic peptide
  N-term Ac
  MOD_RES (4)..(4): Alpha-Me R8-octenyl-alanine olefin amino acid connected by an all-carbon crosslinker comprising one double bond
  misc_feature (4)..(11): Crosslink between residues
  MOD_RES (11)..(11): Alpha-Me S5-pentenyl-alanine olefin amino acid connected by an all-carbon crosslinker comprising one double bond
  MOD_RES (17)..(17): D-amino acid
  C-term NH2
LTFAHYWAQLAAAAAAA

SEQ ID NO: 508 - protein, 17 aa, Artificial Sequence
  Description of Artificial Sequence: Synthetic peptide
  N-term Ac
  MOD_RES (4)..(4): Alpha-Me R8-octenyl-alanine olefin amino acid connected by an all-carbon crosslinker comprising one double bond
  misc_feature (4)..(11): Crosslink between residues
  MOD_RES (11)..(11): Alpha-Me S5-pentenyl-alanine olefin amino acid connected by an all-carbon crosslinker comprising one double bond
  MOD_RES (17)..(17): D-amino acid
  C-term NH2
LTFAQYWAQLAAAAAAA

SEQ ID NO: 509 - protein, 17 aa, Artificial Sequence
  Description of Artificial Sequence: Synthetic peptide
  N-term Ac
  MOD_RES (4)..(4): Alpha-Me R8-octenyl-alanine olefin amino acid connected by an all-carbon crosslinker comprising one double bond
  misc_feature (4)..(11): Crosslink between residues
  MOD_RES (5)..(5): Cit
  MOD_RES (11)..(11): Alpha-Me S5-pentenyl-alanine olefin amino acid connected by an all-carbon crosslinker comprising one double bond
  MOD_RES (17)..(17): D-amino acid
  C-term NH2
LTFAXYWAQLAAAAAAA

SEQ ID NO: 510 - protein, 19 aa, Artificial Sequence
  Description of Artificial Sequence: Synthetic peptide
  N-term Ac
  MOD_RES (4)..(4): Alpha-Me R8-octenyl-alanine olefin amino acid connected by an all-carbon crosslinker comprising one double bond
  misc_feature (4)..(13): Crosslink between residues
  MOD_RES (6)..(7): D-amino acid
  MOD_RES (13)..(13): Alpha-Me S5-pentenyl-alanine olefin amino acid connected by an all-carbon crosslinker comprising one double bond
  MOD_RES (19)..(19): D-amino acid
  C-term NH2
LTFAELAYWAQLAAAAAAA

SEQ ID NO: 511 - protein, 18 aa, Artificial Sequence
  Description of Artificial Sequence: Synthetic peptide
  N-term Ac
  MOD_RES (4)..(4): Alpha-Me R8-octenyl-alanine olefin amino acid connected by an all-carbon crosslinker comprising one double bond
  misc_feature (4)..(12): Crosslink between residues
  MOD_RES (5)..(5): Phe-4
  MOD_RES (6)..(6): D-amino acid
  MOD_RES (12)..(121): Alpha-Me S5-pentenyl-alanine olefin amino acid connected by an all-carbon crosslinker comprising one double bond
  MOD_RES (18)..(18): D-amino acid
  C-term NH2
LTFAFGYWAQLAAAAAAA

SEQ ID NO: 512 - protein, 17 aa, Artificial Sequence
  Description of Artificial Sequence: Synthetic peptide
  N-term Ac
  MOD_RES (4)..(4): Alpha-Me R8-octenyl-alanine olefin amino acid connected by an all-carbon crosslinker comprising one double bond
  misc_feature (4)..(11): Crosslink between residues
  MOD_RES (5)..(5): 2m-Arg
  MOD_RES (11)..(11): Alpha-Me S5-pentenyl-alanine olefin amino acid connected by an all-carbon crosslinker comprising one double bond
  MOD_RES (17)..(17): D-amino acid
  C-term NH2
LTFARYWAQLAAAAAAA

SEQ ID NO: 513 - protein, 17 aa, Artificial Sequence
  Description of Artificial Sequence: Synthetic peptide
  N-term Ac
  MOD_RES (4)..(4): Alpha-Me R8-octenyl-alanine olefin amino acid connected by an all-carbon crosslinker comprising one double bond
  misc_feature (4)..(11): Crosslink between residues
  MOD_RES (5)..(5): ip-Lys
  MOD_RES (11)..(11): Alpha-Me S5-pentenyl-alanine olefin amino acid connected by an all-carbon crosslinker comprising one double bond
  MOD_RES (17)..(17): D-amino acid
  C-term NH2
LTFAKYWAQLAAAAAAA

SEQ ID NO: 514 - protein, 17 aa, Artificial Sequence
  Description of Artificial Sequence: Synthetic peptide
  N-term Ac
  MOD_RES (4)..(4): Alpha-Me R8-octenyl-alanine olefin amino acid connected by an all-carbon crosslinker comprising one double bond
  misc_feature (4)..(11): Crosslink between residues
  MOD_RES (5)..(5): Phe-4NH2
  MOD_RES (11)..(11): Alpha-Me S5-pentenyl-alanine olefin amino acid connected by an all-carbon crosslinker comprising one double bond
  MOD_RES (17)..(17): D-amino acid
  C-term NH2
LTFAFYWAQLAAAAAAA

SEQ ID NO: 515 - protein, 17 aa, Artificial Sequence
  Description of Artificial Sequence: Synthetic peptide
  N-term Ac
  MOD_RES (4)..(4): Alpha-Me R8-octenyl-alanine olefin amino acid connected by an all-carbon crosslinker comprising one double bond
  misc_feature (4)..(11): Crosslink between residues
  MOD_RES (11)..(11): Alpha-Me S5-pentenyl-alanine olefin amino acid connected by an all-carbon crosslinker comprising one double bond
  MOD_RES (17)..(17): D-amino acid
  C-term NH2
LTFAEYWAALAAAAAAA

SEQ ID NO: 516 - protein, 17 aa, Artificial Sequence
  Description of Artificial Sequence: Synthetic peptide
  N-term Ac
  MOD_RES (4)..(4): Alpha-Me R8-octenyl-alanine olefin amino acid connected by an all-carbon crosslinker comprising one double bond
  misc_feature (4)..(11): Crosslink between residues
  MOD_RES (11)..(11): Alpha-Me S5-pentenyl-alanine olefin amino acid connected by an all-carbon crosslinker comprising one double bond
  MOD_RES (17)..(17): D-amino acid
  C-term NH2
LTFAEYWALLAAAAAAA

SEQ ID NO: 517 - protein, 17 aa, Artificial Sequence
  Description of Artificial Sequence: Synthetic peptide
  N-term Ac
  MOD_RES (4)..(4): Alpha-Me R8-octenyl-alanine olefin amino acid connected by an all-carbon crosslinker comprising one double bond
  misc_feature (4)..(11): Crosslink between residues
  MOD_RES (9)..(9): 2-aminoisobutyric acid
  MOD_RES (11)..(11): Alpha-Me S5-pentenyl-alanine olefin amino acid connected by an all-carbon crosslinker comprising one double bond
  MOD_RES (17)..(17): D-amino acid
  C-term NH2
LTFAEYWAXLAAAAAAA

SEQ ID NO: 518 - protein, 17 aa, Artificial Sequence
  Description of Artificial Sequence: Synthetic peptide
  N-term Ac
  MOD_RES (4)..(4): Alpha-Me R8-octenyl-alanine olefin amino acid connected by an all-carbon crosslinker comprising one double bond
  misc_feature (4)..(11): Crosslink between residues
  MOD_RES (11)..(11): Alpha-Me S5-pentenyl-alanine olefin amino acid connected by an all-carbon crosslinker comprising one double bond
  MOD_RES (17)..(17): D-amino acid
  C-term NH2
LTFAEYWASLAAAAAAA

SEQ ID NO: 519 - protein, 17 aa, Artificial Sequence
  Description of Artificial Sequence: Synthetic peptide
  N-term Ac
  MOD_RES (4)..(4): Alpha-Me R8-octenyl-alanine olefin amino acid connected by an all-carbon crosslinker comprising one double bond
  misc_feature (4)..(11): Crosslink between residues
  MOD_RES (11)..(11): Alpha-Me S5-pentenyl-alanine olefin amino acid connected by an all-carbon crosslinker comprising one double bond
  MOD_RES (17)..(17): D-amino acid
  C-term NH2
LTFAEYWANLAAAAAAA

SEQ ID NO: 520 - protein, 17 aa, Artificial Sequence
  Description of Artificial Sequence: Synthetic peptide
  N-term Ac
  MOD_RES (4)..(4): Alpha-Me R8-octenyl-alanine olefin amino acid connected by an all-carbon crosslinker comprising one double bond
  misc_feature (4)..(11): Crosslink between residues
  MOD_RES (9)..(9): Cit
  MOD_RES (11)..(11): Alpha-Me S5-pentenyl-alanine olefin amino acid connected by an all-carbon crosslinker comprising one double bond
  MOD_RES (17)..(17): D-amino acid
  C-term NH2
LTFAEYWAXLAAAAAAA

SEQ ID NO: 521 - protein, 17 aa, Artificial Sequence
  Description of Artificial Sequence: Synthetic peptide
  N-term Ac
  MOD_RES (4)..(4): Alpha-Me R8-octenyl-alanine olefin amino acid connected by an all-carbon crosslinker comprising one double bond
  misc_feature (4)..(11): Crosslink between residues
  MOD_RES (11)..(11): Alpha-Me S5-pentenyl-alanine olefin amino acid connected by an all-carbon crosslinker comprising one double bond
  MOD_RES (17)..(17): D-amino acid
  C-term NH2
LTFAEYWAHLAAAAAAA

SEQ ID NO: 522 - protein, 17 aa, Artificial Sequence
  Description of Artificial Sequence: Synthetic peptide
  N-term Ac
  MOD_RES (4)..(4): Alpha-Me R8-octenyl-alanine olefin amino acid connected by an all-carbon crosslinker comprising one double bond
  misc_feature (4)..(11): Crosslink between residues
  MOD_RES (11)..(11): Alpha-Me S5-pentenyl-alanine olefin amino acid connected by an all-carbon crosslinker comprising one double bond
  MOD_RES (17)..(17): D-amino acid
  C-term NH2
LTFAEYWARLAAAAAAA

SEQ ID NO: 523 - protein, 17 aa, Artificial Sequence
  Description of Artificial Sequence: Synthetic peptide
  N-term Ac
  MOD_RES (4)..(4): Alpha-Me R8-octenyl-alanine olefin amino acid connected by an all-carbon crosslinker comprising one double bond
  MOD_RES (6)..(6): pTyr
  misc_feature (4)..(11): Crosslink between residues
  MOD_RES (11)..(11): Alpha-Me S5-pentenyl-alanine olefin amino acid connected by an all-carbon crosslinker comprising one double bond
  MOD_RES (17)..(17): D-amino acid
  C-term NH2
LTFAEYWAQLAAAAAAA

SEQ ID NO: 524 - protein, 14 aa, Artificial Sequence
  Description of Artificial Sequence: Synthetic peptide
  N-term Cbm
  MOD_RES (4)..(4): Alpha-Me R8-octenyl-alanine olefin amino acid connected by an all-carbon crosslinker comprising one double bond
  misc_feature (4)..(11): Crosslink between residues
  MOD_RES (10)..(10): Cyclobutyl-Ala
  MOD_RES (11)..(11): Alpha-Me S5-pentenyl-alanine olefin amino acid connected by an all-carbon crosslinker comprising one double bond
  C-term NH2
LTFAEYWAQAASAA

SEQ ID NO: 525 - protein, 17 aa, Artificial Sequence
  Description of Artificial Sequence: Synthetic peptide
  N-term Cbm
  MOD_RES (4)..(4): Alpha-Me R8-octenyl-alanine olefin amino acid connected by an all-carbon crosslinker comprising one double bond
  misc_feature (4)..(11): Crosslink between residues
  MOD_RES (11)..(11): Alpha-Me S5-pentenyl-alanine olefin amino acid connected by an all-carbon crosslinker comprising one double bond
  MOD_RES (17)..(17): D-amino acid
  C-term NH2
LTFAEYWAQLAAAAAAA

SEQ ID NO: 526 - protein, 17 aa, Artificial Sequence
  Description of Artificial Sequence: Synthetic peptide
  N-term Ac
  MOD_RES (4)..(4): Alpha-Me R8-octenyl-alanine olefin amino acid connected by an all-carbon crosslinker comprising one double bond
  misc_feature (4)..(11): Crosslink between residues
  MOD_RES (11)..(11): Alpha-Me S5-pentenyl-alanine olefin amino acid connected by an all-carbon crosslinker comprising one double bond
  MOD_RES (17)..(17): D-amino acid
  C-term NH2
LTFAEYWAQLASAAAAA

SEQ ID NO: 527 - protein, 17 aa, Artificial Sequence
  Description of Artificial Sequence: Synthetic peptide
  N-term Ac
  MOD_RES (4)..(4): Alpha-Me R8-octenyl-alanine olefin amino acid connected by an all-carbon crosslinker comprising one double bond
  misc_feature (4)..(11): Crosslink between residues
  MOD_RES (11)..(11): Alpha-Me S5-pentenyl-alanine olefin amino acid connected by an all-carbon crosslinker comprising one double bond
  MOD_RES (17)..(17): D-amino acid
  C-term NH2
LTFAEYWAQLAAAAASA

SEQ ID NO: 528 - protein, 17 aa, Artificial Sequence
  Description of Artificial Sequence: Synthetic peptide
  N-term Ac
  MOD_RES (4)..(4): Alpha-Me R8-octenyl-alanine olefin amino acid connected by an all-carbon crosslinker comprising one double bond
  misc_feature (4)..(11): Crosslink between residues
  MOD_RES (11)..(11): Alpha-Me S5-pentenyl-alanine olefin amino acid connected by an all-carbon crosslinker comprising one double bond
  MOD_RES (17)..(17): D-amino acid
  C-term NH2
LTFAEYWAQLASAAASA

SEQ ID NO: 529 - protein, 18 aa, Artificial Sequence
  Description of Artificial Sequence: Synthetic peptide
  N-term Ac
  MOD_RES (4)..(4): Alpha-Me R8-octenyl-alanine olefin amino acid connected by an all-carbon crosslinker comprising one double bond
  misc_feature (4)..(12): Crosslink between residues
  MOD_RES (11)..(11): Beta-Ala
  MOD_RES (12)..(12): Alpha-Me S5-pentenyl-alanine olefin amino acid connected by an all-carbon crosslinker comprising one double bond
  MOD_RES (18)..(18): D-amino acid
  C-term NH2
LTFAEYWAQTAAAAAAAA

SEQ ID NO: 530 - protein, 17 aa, Artificial Sequence
  Description of Artificial Sequence: Synthetic peptide
  N-term Ac
  MOD_RES (4)..(4): Alpha-Me R8-octenyl-alanine olefin amino acid connected by an all-carbon crosslinker comprising one double bond
  misc_feature (4)..(11): Crosslink between residues
  MOD_RES (10)..(10): Adamantyl-Gly
  MOD_RES (11)..(11): Alpha-Me S5-pentenyl-alanine olefin amino acid connected by an all-carbon crosslinker comprising one double bond
  MOD_RES (17)..(17): D-amino acid
  C-term NH2
LTFAEYWAQGAAAAAAA

SEQ ID NO: 531 - protein, 17 aa, Artificial Sequence
  Description of Artificial Sequence: Synthetic peptide
  N-term Ac
  MOD_RES (4)..(4): Alpha-Me R8-octenyl-alanine olefin amino acid connected by an all-carbon crosslinker comprising one double bond
  misc_feature (4)..(11): Crosslink between residues
  MOD_RES (10)..(10): Cyclohexyl-Ala
  MOD_RES (11)..(11): Alpha-Me S5-pentenyl-alanine olefin amino acid connected by an all-carbon crosslinker comprising one double bond
  MOD_RES (17)..(17): D-amino acid
  C-term NH2
LTFAEYWAQAAAAAAAA

SEQ ID NO: 532 - protein, 17 aa, Artificial Sequence
  Description of Artificial Sequence: Synthetic peptide
  N-term Ac
  MOD_RES (4)..(4): Alpha-Me R8-octenyl-alanine olefin amino acid connected by an all-carbon crosslinker comprising one double bond
  misc_feature (4)..(11): Crosslink between residues
  MOD_RES (10)..(10): homo-cyclohexyl-Ala
  MOD_RES (11)..(11): Alpha-Me S5-pentenyl-alanine olefin amino acid connected by an all-carbon crosslinker comprising one double bond
  MOD_RES (17)..(17): D-amino acid
  C-term NH2
LTFAEYWAQAAAAAAAA

SEQ ID NO: 533 - protein, 17 aa, Artificial Sequence
  Description of Artificial Sequence: Synthetic peptide
  N-term Ac
  MOD_RES (4)..(4): Alpha-Me R8-octenyl-alanine olefin amino acid connected by an all-carbon crosslinker comprising one double bond
  misc_feature (4)..(11): Crosslink between residues
  MOD_RES (11)..(11): Alpha-Me S5-pentenyl-alanine olefin amino acid connected by an all-carbon crosslinker comprising one double bond
  MOD_RES (17)..(17): D-amino acid
  C-term NH2
LTFAEYWAQFAAAAAAA

SEQ ID NO: 534 - protein, 17 aa, Artificial Sequence
  Description of Artificial Sequence: Synthetic peptide
  N-term Ac
  MOD_RES (4)..(4): Alpha-Me R8-octenyl-alanine olefin amino acid connected by an all-carbon crosslinker comprising one double bond
  misc_feature (4)..(11): Crosslink between residues
  MOD_RES (10)..(10): homo-Phe
  MOD_RES (11)..(11): Alpha-Me S5-pentenyl-alanine olefin amino acid connected by an all-carbon crosslinker comprising one double bond
  MOD_RES (17)..(17): D-amino acid
  C-term NH2
LTFAEYWAQFAAAAAAA

SEQ ID NO: 535 - protein, 17 aa, Artificial Sequence
  Description of Artificial Sequence: Synthetic peptide
  N-term Ac
  MOD_RES (4)..(4): Alpha-Me R8-octenyl-alanine olefin amino acid connected by an all-carbon crosslinker comprising one double bond
  misc_feature (4)..(11): Crosslink between residues
  MOD_RES (11)..(11): Alpha-Me S5-pentenyl-alanine olefin amino acid connected by an all-carbon crosslinker comprising one double bond
  MOD_RES (14)..(14): Norleucine
  MOD_RES (17)..(17): D-amino acid
  C-term NH2
LTFAEYWAQLAAALAAA

SEQ ID NO: 536 - protein, 17 aa, Artificial Sequence
  Description of Artificial Sequence: Synthetic peptide
  N-term Ac
  MOD_RES (4)..(4): Alpha-Me R8-octenyl-alanine olefin amino acid connected by an all-carbon crosslinker comprising one double bond
  misc_feature (4)..(11): Crosslink between residues
  MOD_RES (10)..(10): Adamantyl-Gly
  MOD_RES (11)..(11): Alpha-Me S5-pentenyl-alanine olefin amino acid connected by an all-carbon crosslinker comprising one double bond
  MOD_RES (14)..(14): Norleucine
  MOD_RES (17)..(17): D-amino acid
  C-term NH2
LTFAEYWAQGAAALAAA

SEQ ID NO: 537 - protein, 18 aa, Artificial Sequence
  Description of Artificial Sequence: Synthetic peptide
  N-term 4FBz
  MOD_RES (1)..(1): Beta-Ala
  MOD_RES (5)..(5): Alpha-Me R8-octenyl-alanine olefin amino acid connected by an all-carbon crosslinker comprising one double bond
  misc_feature (5)..(12): Crosslink between residues
  MOD_RES (12)..(12): Alpha-Me S5-pentenyl-alanine olefin amino acid connected by an all-carbon crosslinker comprising one double bond
  MOD_RES (18)..(18): D-amino acid
  C-term NH2
ALTFAEYWAQLAAAAAAA

SEQ ID NO: 538 - protein, 15 aa, Artificial Sequence
  Description of Artificial Sequence: Synthetic peptide
  N-term 4FBz
  MOD_RES (1)..(1): Beta-Ala
  MOD_RES (5)..(5): Alpha-Me R8-octenyl-alanine olefin amino acid connected by an all-carbon crosslinker comprising one double bond
  misc_feature (5)..(12): Crosslink between residues
  MOD_RES (11)..(11): Cyclobutyl-Ala
  MOD_RES (12)..(12): Alpha-Me S5-pentenyl-alanine olefin amino acid connected by an all-carbon crosslinker comprising one double bond
  C-term NH2
ALTFAEYWAQAASAA

SEQ ID NO: 539 - protein, 17 aa, Artificial Sequence
  Description of Artificial Sequence: Synthetic peptide
  N-term Ac
  MOD_RES (4)..(4): Alpha-Me R5-pentenyl-alanine olefin amino acid connected by an all-carbon crosslinker comprising one double bond
  misc_feature (4)..(11): Crosslink between residues
  MOD_RES (11)..(11): Alpha-Me S8-octenyl-alanine olefin amino acid connected by an all-carbon crosslinker comprising one double bond
  MOD_RES (17)..(17): D-amino acid
  C-term NH2
LTFAEYWAQLAAAAAAA

SEQ ID NO: 540 - protein, 14 aa, Artificial Sequence
  Description of Artificial Sequence: Synthetic peptide
  N-term Ac
  MOD_RES (4)..(4): Alpha-Me R5-pentenyl-alanine olefin amino acid connected by an all-carbon crosslinker comprising one double bond
  misc_feature (4)..(11): Crosslink between residues
  MOD_RES (10)..(10): Cyclobutyl-Ala
  MOD_RES (11)..(11): Alpha-Me S8-octenyl-alanine olefin amino acid connected by an all-carbon crosslinker comprising one double bond
  C-term NH2
LTFAEYWAQAASAA

SEQ ID NO: 541 - protein, 17 aa, Artificial Sequence
  Description of Artificial Sequence: Synthetic peptide
  N-term Ac
  MOD_RES (4)..(4): Alpha-Me R8-octenyl-alanine olefin amino acid connected by an all-carbon crosslinker comprising one double bond
  misc_feature (4)..(11): Crosslink between residues
  MOD_RES (11)..(11): Alpha-Me S5-pentenyl-alanine olefin amino acid connected by an all-carbon crosslinker comprising one double bond
  MOD_RES (14)..(14): hhLeu
  MOD_RES (17)..(17): D-amino acid
  C-term NH2
LTFAEYWAQLAAALAAA

SEQ ID NO: 542 - protein, 19 aa, Artificial Sequence
  Description of Artificial Sequence: Synthetic peptide
  N-term Ac
  MOD_RES (4)..(4): Alpha-Me R8-octenyl-alanine olefin amino acid connected by an all-carbon crosslinker comprising one double bond
  misc_feature (4)..(11): Crosslink between residues
  MOD_RES (11)..(11): Alpha-Me S5-pentenyl-alanine olefin amino acid connected by an all-carbon crosslinker comprising one double bond
  MOD_RES (19)..(19): D-amino acid
  C-term NH2
LTFAEYWAQLAAAAAAAAA

SEQ ID NO: 543 - protein, 20 aa, Artificial Sequence
  Description of Artificial Sequence: Synthetic peptide
  N-term Ac
  MOD_RES (4)..(4): Alpha-Me R8-octenyl-alanine olefin amino acid connected by an all-carbon crosslinker comprising one double bond
  misc_feature (4)..(11): Crosslink between residues
  MOD_RES (11)..(11): Alpha-Me S5-pentenyl-alanine olefin amino acid connected by an all-carbon crosslinker comprising one double bond
  MOD_RES (20)..(20): D-amino acid
  C-term NH2
LTFAEYWAQLAAAAAAAAAA

SEQ ID NO: 544 - protein, 21 aa, Artificial Sequence
  Description of Artificial Sequence: Synthetic peptide
  N-term Ac
  MOD_RES (4)..(4): Alpha-Me R8-octenyl-alanine olefin amino acid connected by an all-carbon crosslinker comprising one double bond
  misc_feature (4)..(11): Crosslink between residues
  MOD_RES (11)..(11): Alpha-Me S5-pentenyl-alanine olefin amino acid connected by an all-carbon crosslinker comprising one double bond
  MOD_RES (21)..(21): D-amino acid
  C-term NH2
LTFAEYWAQLAAAAAAAAAAA

SEQ ID NO: 545 - protein, 14 aa, Artificial Sequence
  Description of Artificial Sequence: Synthetic peptide
  N-term Ac
  MOD_RES (4)..(4): Alpha-Me R8-octenyl-alanine olefin amino acid connected by an all-carbon crosslinker comprising one double bond
  misc_feature (4)..(11): Crosslink between residues
  MOD_RES (10)..(10): Cyclobutyl-Ala
  MOD_RES (11)..(11): Alpha-Me S5-pentenyl-alanine olefin amino acid connected by an all-carbon crosslinker comprising one double bond
  C-term NH2
LTAAEYAAQAASAA

SEQ ID NO: 546 - protein, 17 aa, Artificial Sequence
  Description of Artificial Sequence: Synthetic peptide
  N-term Ac
  MOD_RES (4)..(4): Alpha-Me R8-octenyl-alanine olefin amino acid connected by an all-carbon crosslinker comprising one double bond
  misc_feature (4)..(11): Crosslink between residues
  MOD_RES (11)..(11): Alpha-Me S5-pentenyl-alanine olefin amino acid connected by an all-carbon crosslinker comprising one double bond
  MOD_RES (17)..(17): D-amino acid
  C-term NH2
LTAAEYAAQLAAAAAAA

SEQ ID NO: 547 - protein, 17 aa, Artificial Sequence
  Description of Artificial Sequence: Synthetic peptide
  N-term Ac
  MOD_RES (4)..(4): Alpha-Me R8-octenyl-alanine olefin amino acid connected by an all-carbon crosslinker comprising one double bond
  misc_feature (4)..(11): Crosslink between residues
  MOD_RES (6)..(6): Pmp
  MOD_RES (11)..(11): Alpha-Me S5-pentenyl-alanine olefin amino acid connected by an all-carbon crosslinker comprising one double bond
  MOD_RES (17)..(17): D-amino acid
  C-term NH2
LTFAEXWAQLAAAAAAA

SEQ ID NO: 548 - protein, 14 aa, Artificial Sequence
  Description of Artificial Sequence: Synthetic peptide
  N-term Ac
  MOD_RES (4)..(4): Alpha-Me R8-octenyl-alanine olefin amino acid connected by an all-carbon crosslinker comprising one double bond
  misc_feature (4)..(11): Crosslink between residues
  MOD_RES (6)..(6): Pmp
  MOD_RES (10)..(10): Cyclobutyl-Ala
  MOD_RES (11)..(11): Alpha-Me S5-pentenyl-alanine olefin amino acid connected by an all-carbon crosslinker comprising one double bond
  C-term NH2
LTFAEXWAQAASAA

SEQ ID NO: 549 - protein, 12 aa, Artificial Sequence
  Description of Artificial Sequence: Synthetic peptide
  N-term Ac
  MOD_RES (4)..(4): Alpha-Me R8-octenyl-alanine olefin amino acid connected by an all-carbon crosslinker comprising one double bond
  misc_feature (4)..(11): Crosslink between residues
  MOD_RES (11)..(11): Alpha-Me S5-pentenyl-alanine olefin amino acid connected by an all-carbon crosslinker comprising one double bond
  C-term NH2
ATFAHYWAQLAS

SEQ ID NO: 550 - protein, 12 aa, Artificial Sequence
  Description of Artificial Sequence: Synthetic peptide
  N-term Ac
  MOD_RES (4)..(4): Alpha-Me R8-octenyl-alanine olefin amino acid connected by an all-carbon crosslinker comprising one double bond
  misc_feature (4)..(11): Crosslink between residues
  MOD_RES (11)..(11): Alpha-Me S5-pentenyl-alanine olefin amino acid connected by an all-carbon crosslinker comprising one double bond
  C-term NH2
LTFAHAWAQLAS

SEQ ID NO: 551 - protein, 12 aa, Artificial Sequence
  Description of Artificial Sequence: Synthetic peptide
  N-term Ac
  MOD_RES (4)..(4): Alpha-Me R8-octenyl-alanine olefin amino acid connected by an all-carbon crosslinker comprising one double bond
  misc_feature (4)..(11): Crosslink between residues
  MOD_RES (11)..(11): Alpha-Me S5-pentenyl-alanine olefin amino acid connected by an all-carbon crosslinker comprising one double bond
  C-term NH2
LTFAHYWAQAAS

SEQ ID NO: 552 - protein, 13 aa, Artificial Sequence
  Description of Artificial Sequence: Synthetic peptide
  N-term Ac
  MOD_RES (4)..(4): Alpha-Me R8-octenyl-alanine olefin amino acid connected by an all-carbon crosslinker comprising one double bond
  misc_feature (4)..(11): Crosslink between residues
  MOD_RES (10)..(10): Cyclobutyl-Ala
  MOD_RES (11)..(11): Alpha-Me S5-pentenyl-alanine olefin amino acid connected by an all-carbon crosslinker comprising one double bond
  C-term NH2
LTFAEYWAQAASA

SEQ ID NO: 553 - protein, 14 aa, Artificial Sequence
  Description of Artificial Sequence: Synthetic peptide
  N-term Ac
  MOD_RES (4)..(4): Alpha-Me R8-octenyl-alanine olefin amino acid connected by an all-carbon crosslinker comprising one double bond
  misc_feature (4)..(11): Crosslink between residues
  MOD_RES (11)..(11): Alpha-Me S5-pentenyl-alanine olefin amino acid connected by an all-carbon crosslinker comprising one double bond
  C-term NH2
LTFAEYWAQLASAA

SEQ ID NO: 554 - protein, 14 aa, Artificial Sequence
  Description of Artificial Sequence: Synthetic peptide
  N-term Ac
  MOD_RES (4)..(4): Alpha-Me R8-octenyl-alanine olefin amino acid connected by an all-carbon crosslinker comprising one double bond
  misc_feature (4)..(11): Crosslink between residues
  MOD_RES (10)..(10): Cyclobutyl-Ala
  MOD_RES (11)..(11): Alpha-Me S5-pentenyl-alanine olefin amino acid connected by an all-carbon crosslinker comprising one double bond
  C-term NH2
LTFAHYWAQAASAA

SEQ ID NO: 555 - protein, 14 aa, Artificial Sequence
  Description of Artificial Sequence: Synthetic peptide
  N-term Ac
  MOD_RES (4)..(4): Alpha-Me R8-octenyl-alanine olefin amino acid connected by an all-carbon crosslinker comprising one double bond
  misc_feature (4)..(11): Crosslink between residues
  MOD_RES (10)..(10): Cyclobutyl-Ala
  MOD_RES (11)..(11): Alpha-Me S5-pentenyl-alanine olefin amino acid connected by an all-carbon crosslinker comprising one double bond
  C-term NH2
LTFASYWAQAASAA

SEQ ID NO: 556 - protein, 14 aa, Artificial Sequence
  Description of Artificial Sequence: Synthetic peptide
  N-term Ac
  MOD_RES (4)..(4): Alpha-Me R8-octenyl-alanine olefin amino acid connected by an all-carbon crosslinker comprising one double bond
  misc_feature (4)..(11): Crosslink between residues
  MOD_RES (10)..(10): Cyclobutyl-Ala
  MOD_RES (11)..(11): Alpha-Me S5-pentenyl-alanine olefin amino acid connected by an all-carbon crosslinker comprising one double bond
  C-term NH2
LTFARYWAQAASAA

SEQ ID NO: 557 - protein, 14 aa, Artificial Sequence
  Description of Artificial Sequence: Synthetic peptide
  N-term Ac
  MOD_RES (4)..(4): Alpha-Me R8-octenyl-alanine olefin amino acid connected by an all-carbon crosslinker comprising one double bond
  misc_feature (4)..(11): Crosslink between residues
  MOD_RES (10)..(10): Cyclobutyl-Ala
  MOD_RES (11)..(11): Alpha-Me S5-pentenyl-alanine olefin amino acid connected by an all-carbon crosslinker comprising one double bond
  C-term NH2
LTFAKYWAQAASAA

SEQ ID NO: 558 - protein, 14 aa, Artificial Sequence
  Description of Artificial Sequence: Synthetic peptide
  N-term Ac
  MOD_RES (4)..(4): Alpha-Me R8-octenyl-alanine olefin amino acid connected by an all-carbon crosslinker comprising one double bond
  misc_feature (4)..(11): Crosslink between residues
  MOD_RES (10)..(10): Cyclobutyl-Ala
  MOD_RES (11)..(11): Alpha-Me S5-pentenyl-alanine olefin amino acid connected by an all-carbon crosslinker comprising one double bond
  C-term NH2
LTFAQYWAQAASAA

SEQ ID NO: 559 - protein, 14 aa, Artificial Sequence
  Description of Artificial Sequence: Synthetic peptide
  N-term Ac
  MOD_RES (4)..(4): Alpha-Me R8-octenyl-alanine olefin amino acid connected by an all-carbon crosslinker comprising one double bond
  misc_feature (4)..(11): Crosslink between residues
  MOD_RES (10)..(10): Cyclobutyl-Ala
  MOD_RES (11)..(11): Alpha-Me S5-pentenyl-alanine olefin amino acid connected by an all-carbon crosslinker comprising one double bond
  C-term NH2
LTFAEYWAAAASAA

SEQ ID NO: 560 - protein, 14 aa, Artificial Sequence
  Description of Artificial Sequence: Synthetic peptide
  N-term Ac
  MOD_RES (4)..(4): Alpha-Me R8-octenyl-alanine olefin amino acid connected by an all-carbon crosslinker comprising one double bond
  misc_feature (4)..(11): Crosslink between residues
  MOD_RES (10)..(10): Cyclobutyl-Ala
  MOD_RES (11)..(11): Alpha-Me S5-pentenyl-alanine olefin amino acid connected by an all-carbon crosslinker comprising one double bond
  C-term NH2
LTFAEYWAQAAAAA

SEQ ID NO: 561 - protein, 16 aa, Artificial Sequence
  Description of Artificial Sequence: Synthetic peptide
  N-term Ac
  MOD_RES (4)..(4): Alpha-Me R8-octenyl-alanine olefin amino acid connected by an all-carbon crosslinker comprising one double bond
  misc_feature (4)..(11): Crosslink between residues
  MOD_RES (11)..(11): Alpha-Me S5-pentenyl-alanine olefin amino acid connected by an all-carbon crosslinker comprising one double bond
  C-term OH
LTFAEYWAQLAAAAAA

SEQ ID NO: 562 - protein, 15 aa, Artificial Sequence
  Description of Artificial Sequence: Synthetic peptide
  N-term Ac
  MOD_RES (4)..(4): Alpha-Me R8-octenyl-alanine olefin amino acid connected by an all-carbon crosslinker comprising one double bond
  misc_feature (4)..(11): Crosslink between residues
  MOD_RES (11)..(11): Alpha-Me S5-pentenyl-alanine olefin amino acid connected by an all-carbon crosslinker comprising one double bond
  C-term OH
LTFAEYWAQLAAAAA

SEQ ID NO: 563 - protein, 13 aa, Artificial Sequence
  Description of Artificial Sequence: Synthetic peptide
  N-term Ac
  MOD_RES (4)..(4): Alpha-Me R8-octenyl-alanine olefin amino acid connected by an all-carbon crosslinker comprising one double bond
  misc_feature (4)..(11): Crosslink between residues
  MOD_RES (11)..(11): Alpha-Me S5-pentenyl-alanine olefin amino acid connected by an all-carbon crosslinker comprising one double bond
  C-term OH
LTFAEYWAQLAAA

SEQ ID NO: 564 - protein, 17 aa, Artificial Sequence
  Description of Artificial Sequence: Synthetic peptide
  N-term Ac
  MOD_RES (4)..(4): Alpha-Me R8-octenyl-alanine olefin amino acid connected by an all-carbon crosslinker comprising one double bond
  misc_feature (4)..(11): Crosslink between residues
  MOD_RES (6)..(6): Phe-4bOH2
  MOD_RES (11)..(11): Alpha-Me S5-pentenyl-alanine olefin amino acid connected by an all-carbon crosslinker comprising one double bond
  MOD_RES (17)..(17): D-amino acid
  C-term NH2
LTFAAFWAQLAAAAAAA

SEQ ID NO: 565 - protein, 17 aa, Artificial Sequence
  Description of Artificial Sequence: Synthetic peptide
  N-term Ac
  MOD_RES (4)..(4): Alpha-Me R8-octenyl-alanine olefin amino acid connected by an all-carbon crosslinker comprising one double bond
  misc_feature (4)..(11): Crosslink between residues
  MOD_RES (6)..(6): Phe-4bOH2
  MOD_RES (11)..(11): Alpha-Me S5-pentenyl-alanine olefin amino acid connected by an all-carbon crosslinker comprising one double bond
  MOD_RES (17)..(17): D-amino acid
  C-term NH2
LTFAAFWAALAAAAAAA

SEQ ID NO: 566 - protein, 14 aa, Artificial Sequence
  Description of Artificial Sequence: Synthetic peptide
  N-term Ac
  MOD_RES (4)..(4): Alpha-Me R8-octenyl-alanine olefin amino acid connected by an all-carbon crosslinker comprising one double bond
  misc_feature (4)..(11): Crosslink between residues
  MOD_RES (6)..(6): Phe-4bOH2
  MOD_RES (10)..(10): Cyclobutyl-Ala
  MOD_RES (11)..(11): Alpha-Me S5-pentenyl-alanine olefin amino acid connected by an all-carbon crosslinker comprising one double bond
  C-term NH2
LTFAEFWAQAASAA

SEQ ID NO: 567 - protein, 17 aa, Artificial Sequence
  Description of Artificial Sequence: Synthetic peptide
  N-term Ac
  MOD_RES (4)..(4): Alpha-Me R8-octenyl-alanine olefin amino acid connected by an all-carbon crosslinker comprising one double bond
  misc_feature (4)..(11): Crosslink between residues
  MOD_RES (6)..(6): pY
  MOD_RES (11)..(11): Alpha-Me S5-pentenyl-alanine olefin amino acid connected by an all-carbon crosslinker comprising one double bond
  MOD_RES (17)..(17): D-amino acid
  C-term NH2
LTFAAYWAQLAAAAAAA

SEQ ID NO: 568 - protein, 17 aa, Artificial Sequence
  Description of Artificial Sequence: Synthetic peptide
  N-term Ac
  MOD_RES (4)..(4): Alpha-Me R8-octenyl-alanine olefin amino acid connected by an all-carbon crosslinker comprising one double bond
  misc_feature (4)..(11): Crosslink between residues
  MOD_RES (6)..(6): pY
  MOD_RES (11)..(11): Alpha-Me S5-pentenyl-alanine olefin amino acid connected by an all-carbon crosslinker comprising one double bond
  MOD_RES (17)..(17): D-amino acid
  C-term NH2
LTFAAYWAALAAAAAAA

SEQ ID NO: 569 - protein, 14 aa, Artificial Sequence
  Description of Artificial Sequence: Synthetic peptide
  N-term Ac
  MOD_RES (4)..(4): Alpha-Me R8-octenyl-alanine olefin amino acid connected by an all-carbon crosslinker comprising one double bond
  misc_feature (4)..(11): Crosslink between residues
  MOD_RES (6)..(6): pY
  MOD_RES (10)..(10): Cyclobutyl-Ala
  MOD_RES (11)..(11): Alpha-Me S5-pentenyl-alanine olefin amino acid connected by an all-carbon crosslinker comprising one double bond
  C-term NH2
LTFAEYWAQAASAA

SEQ ID NO: 570 - protein, 17 aa, Artificial Sequence
  Description of Artificial Sequence: Synthetic peptide
  N-term Ac
  MOD_RES (4)..(4): Alpha-Me R6-hexynyl-alanine alkynyl amino acids, crosslinke via a dialkyne bond with a second alkynyl amino acid
  misc_feature (4)..(11): Crosslink between residues
  MOD_RES (11)..(11): Alpha-Me S5-pentynyl-alanine alkynyl amino acids, wherein the alkyne forms one half of a dialkyne bond with a second alkynyl amino acid
  MOD_RES (17)..(17): D-amino acid
  C-term NH2
LTFAAYWAQLAAAAAAA

SEQ ID NO: 571 - protein, 14 aa, Artificial Sequence
  Description of Artificial Sequence: Synthetic peptide
  N-term Ac
  MOD_RES (4)..(4): Alpha-Me R6-hexynyl-alanine alkynyl amino acids, crosslinke via a dialkyne bond with a second alkynyl amino acid
  misc_feature (4)..(11): Crosslink between residues
  MOD_RES (10)..(10): Cyclobutyl-Ala
  MOD_RES (11)..(11): Alpha-Me S5-pentynyl-alanine alkynyl amino acids, wherein the alkyne forms one half of a dialkyne bond with a second alkynyl amino acid
  C-term NH2
LTFAEYWAQAASAA

SEQ ID NO: 572 - protein, 17 aa, Artificial Sequence
  Description of Artificial Sequence: Synthetic peptide
  N-term Ac
  MOD_RES (4)..(4): Alpha-Me R6-hexynyl-alanine alkynyl amino acids, crosslinke via a dialkyne bond with a second alkynyl amino acid
  misc_feature (4)..(11): Crosslink between residues
  MOD_RES (11)..(11): Alpha-Me S5-pentynyl-alanine alkynyl amino acids, wherein the alkyne forms one half of a dialkyne bond with a second alkynyl amino acid
  MOD_RES (17)..(17): D-amino acid
  C-term NH2
LTFAEYWAQLAAAAAAA

SEQ ID NO: 573 - protein, 17 aa, Artificial Sequence
  Description of Artificial Sequence: Synthetic peptide
  N-term Ac
  MOD_RES (4)..(4): Alpha-Me R9-nonynyl-alanine alkynyl amino acid crosslinked via an alkyne metathesis reaction with a second alkynyl amino acid
  misc_feature (4)..(11): Crosslink between residues
  MOD_RES (11)..(11): Alpha-Me S6-hexynyl-alanine alkynyl amino acid crosslinked via an alkyne metathesis reaction with a second alkynyl amino acid
  MOD_RES (17)..(17): D-amino acid
  C-term NH2
LTFAEYWAQLAAAAAAA

SEQ ID NO: 574 - protein, 17 aa, Artificial Sequence
  Description of Artificial Sequence: Synthetic peptide
  N-term Ac
  MOD_RES (4)..(4): Alpha-Me R9-nonynyl-alanine alkynyl amino acid crosslinked via an alkyne metathesis reaction with a second alkynyl amino acid
  misc_feature (4)..(11): Crosslink between residues
  MOD_RES (11)..(11): Alpha-Me S6-hexynyl-alanine alkynyl amino acid crosslinked via an alkyne metathesis reaction with a second alkynyl amino acid
  MOD_RES (17)..(17): D-amino acid
  C-term NH2
LTFAEYWAQLAAAAAAA

SEQ ID NO: 575 - protein, 14 aa, Artificial Sequence
  Description of Artificial Sequence: Synthetic peptide
  N-term Ac
  MOD_RES (4)..(4): Alpha-Me R9-nonynyl-alanine alkynyl amino acid crosslinked via an alkyne metathesis reaction with a second alkynyl amino acid
  misc_feature (4)..(11): Crosslink between residues
  MOD_RES (10)..(10): Cyclobutyl-Ala
  MOD_RES (11)..(11): Alpha-Me S6-hexynyl-alanine alkynyl amino acid crosslinked via an alkyne metathesis reaction with a second alkynyl amino acid
  C-term NH2
LTFAEYWAQAASAA

SEQ ID NO: 576 - protein, 14 aa, Artificial Sequence
  Description of Artificial Sequence: Synthetic peptide
  N-term Ac
  MOD_RES (4)..(4): Alpha-Me R9-nonynyl-alanine alkynyl amino acid crosslinked via an alkyne metathesis reaction with a second alkynyl amino acid
  misc_feature (4)..(11): Crosslink between residues
  MOD_RES (10)..(10): Cyclobutyl-Ala
  MOD_RES (11)..(11): Alpha-Me S6-hexynyl-alanine alkynyl amino acid crosslinked via an alkyne metathesis reaction with a second alkynyl amino acid
  C-term NH2
LTAAEYWAQAASAA

SEQ ID NO: 577 - protein, 15 aa, Artificial Sequence
  Description of Artificial Sequence: Synthetic peptide
  N-term 5-FAM
  MOD_RES (1)..(1): Beta-Ala
  MOD_RES (5)..(5): Alpha-Me R9-nonynyl-alanine alkynyl amino acid crosslinked via an alkyne metathesis reaction with a second alkynyl amino acid
  misc_feature (5)..(12): Crosslink between residues
  MOD_RES (11)..(11): Cyclobutyl-Ala
  MOD_RES (12)..(12): Alpha-Me S6-hexynyl-alanine alkynyl amino acid crosslinked via an alkyne metathesis reaction with a second alkynyl amino acid
  C-term NH2
ALTFAEYWAQAASAA

SEQ ID NO: 578 - protein, 18 aa, Artificial Sequence
  Description of Artificial Sequence: Synthetic peptide
  N-term 5-FAM
  MOD_RES (1)..(1): Beta-Ala
  MOD_RES (5)..(5): Alpha-Me R8-octenyl-alanine olefin amino acid connected by an all-carbon crosslinker comprising one double bond
  misc_feature (5)..(12): Crosslink between residues
  MOD_RES (12)..(12): Alpha-Me S5-pentenyl-alanine olefin amino acid connected by an all-carbon crosslinker comprising one double bond
  MOD_RES (18)..(18): D-amino acid
  C-term NH2
ALTFAEYWAQLAAAAAAA

SEQ ID NO: 579 - protein, 18 aa, Artificial Sequence
  Description of Artificial Sequence: Synthetic peptide
  N-term 5-FAM
  MOD_RES (1)..(1): Beta-Ala
  MOD_RES (5)..(5): Alpha-Me R8-octenyl-alanine olefin amino acid that is not connected by a crosslinker
  MOD_RES (12)..(12): Alpha-Me S5-pentenyl-alanine olefin amino acid that is not connected by a crosslinker
  MOD_RES (18)..(18): D-amino acid
  C-term NH2
ALTFAEYWAQLAAAAAAA

SEQ ID NO: 580 - protein, 18 aa, Artificial Sequence
  Description of Artificial Sequence: Synthetic peptide
  N-term 5-FAM
  MOD_RES (1)..(1): Beta-Ala
  MOD_RES (5)..(5): Alpha-Me R8-octenyl-alanine olefin amino acid connected by an all-carbon crosslinker comprising one double bond
  misc_feature (5)..(12): Crosslink between residues
  MOD_RES (12)..(12): Alpha-Me S5-pentenyl-alanine olefin amino acid connected by an all-carbon crosslinker comprising one double bond
  MOD_RES (18)..(18): D-amino acid
  C-term NH2
ALTAAEYWAQLAAAAAAA

SEQ ID NO: 581 - protein, 18 aa, Artificial Sequence
  Description of Artificial Sequence: Synthetic peptide
  N-term 5-FAM
  MOD_RES (1)..(1): Beta-Ala
  MOD_RES (5)..(5): Alpha-Me R8-octenyl-alanine olefin amino acid connected by an all-carbon crosslinker comprising one double bond
  misc_feature (5)..(12): Crosslink between residues
  MOD_RES (12)..(12): Alpha-Me S5-pentenyl-alanine olefin amino acid connected by an all-carbon crosslinker comprising one double bond
  MOD_RES (18)..(18): D-amino acid
  C-term NH2
ALTFAAYWAQLAAAAAAA

SEQ ID NO: 582 - protein, 18 aa, Artificial Sequence
  Description of Artificial Sequence: Synthetic peptide
  N-term 5-FAM
  MOD_RES (1)..(1): Beta-Ala
  MOD_RES (5)..(5): Alpha-Me R8-octenyl-alanine olefin amino acid connected by an all-carbon crosslinker comprising one double bond
  misc_feature (5)..(12): Crosslink between residues
  MOD_RES (12)..(12): Alpha-Me S5-pentenyl-alanine olefin amino acid connected by an all-carbon crosslinker comprising one double bond
  MOD_RES (18)..(18): D-amino acid
  C-term NH2
AATFAEYWAQLAAAAAAA

SEQ ID NO: 583 - protein, 18 aa, Artificial Sequence
  Description of Artificial Sequence: Synthetic peptide
  N-term 5-FAM
  MOD_RES (1)..(1): Beta-Ala
  MOD_RES (5)..(5): Alpha-Me R8-octenyl-alanine olefin amino acid connected by an all-carbon crosslinker comprising one double bond
  misc_feature (5)..(12): Crosslink between residues
  MOD_RES (12)..(12): Alpha-Me S5-pentenyl-alanine olefin amino acid connected by an all-carbon crosslinker comprising one double bond
  MOD_RES (18)..(18): D-amino acid
  C-term NH2
ALAFAEYWAQLAAAAAAA

SEQ ID NO: 584 - protein, 18 aa, Artificial Sequence
  Description of Artificial Sequence: Synthetic peptide
  N-term 5-FAM
  MOD_RES (1)..(1): Beta-Ala
  MOD_RES (5)..(5): Alpha-Me R8-octenyl-alanine olefin amino acid connected by an all-carbon crosslinker comprising one double bond
  misc_feature (5)..(12): Crosslink between residues
  MOD_RES (12)..(12): Alpha-Me S5-pentenyl-alanine olefin amino acid connected by an all-carbon crosslinker comprising one double bond
  MOD_RES (18)..(18): D-amino acid
  C-term NH2
ALTFAEAWAQLAAAAAAA

SEQ ID NO: 585 - protein, 18 aa, Artificial Sequence
  Description of Artificial Sequence: Synthetic peptide
  N-term 5-FAM
  MOD_RES (1)..(1): Beta-Ala
  MOD_RES (5)..(5): Alpha-Me R8-octenyl-alanine olefin amino acid connected by an all-carbon crosslinker comprising one double bond
  misc_feature (5)..(12): Crosslink between residues
  MOD_RES (12)..(12): Alpha-Me S5-pentenyl-alanine olefin amino acid connected by an all-carbon crosslinker comprising one double bond
  MOD_RES (18)..(18): D-amino acid
  C-term NH2
ALTFAEYAAQLAAAAAAA

SEQ ID NO: 586 - protein, 18 aa, Artificial Sequence
  Description of Artificial Sequence: Synthetic peptide
  N-term 5-FAM
  MOD_RES (1)..(1): Beta-Ala
  MOD_RES (5)..(5): Alpha-Me R8-octenyl-alanine olefin amino acid connected by an all-carbon crosslinker comprising one double bond
  misc_feature (5)..(12): Crosslink between residues
  MOD_RES (12)..(12): Alpha-Me S5-pentenyl-alanine olefin amino acid connected by an all-carbon crosslinker comprising one double bond
  MOD_RES (18)..(18): D-amino acid
  C-term NH2
ALTAAEYAAQLAAAAAAA

SEQ ID NO: 587 - protein, 18 aa, Artificial Sequence
  Description of Artificial Sequence: Synthetic peptide
  N-term 5-FAM
  MOD_RES (1)..(1): Beta-Ala
  MOD_RES (5)..(5): Alpha-Me R8-octenyl-alanine olefin amino acid connected by an all-carbon crosslinker comprising one double bond
  misc_feature (5)..(12): Crosslink between residues
  MOD_RES (12)..(12): Alpha-Me S5-pentenyl-alanine olefin amino acid connected by an all-carbon crosslinker comprising one double bond
  MOD_RES (18)..(18): D-amino acid
  C-term NH2
ALTFAEYWAALAAAAAAA

SEQ ID NO: 588 - protein, 18 aa, Artificial Sequence
  Description of Artificial Sequence: Synthetic peptide
  N-term 5-FAM
  MOD_RES (1)..(1): Beta-Ala
  MOD_RES (5)..(5): Alpha-Me R8-octenyl-alanine olefin amino acid connected by an all-carbon crosslinker comprising one double bond
  misc_feature (5)..(12): Crosslink between residues
  MOD_RES (12)..(12): Alpha-Me S5-pentenyl-alanine olefin amino acid connected by an all-carbon crosslinker comprising one double bond
  MOD_RES (18)..(18): D-amino acid
  C-term NH2
ALTFAEYWAQAAAAAAAA

SEQ ID NO: 589 - protein, 15 aa, Artificial Sequence
  Description of Artificial Sequence: Synthetic peptide
  N-term 5-FAM
  MOD_RES (1)..(1): Beta-Ala
  MOD_RES (5)..(5): Alpha-Me R8-octenyl-alanine olefin amino acid that is not connected by a crosslinker
  MOD_RES (11)..(11): Cyclobutyl-Ala
  MOD_RES (12)..(12): Alpha-Me S5-pentenyl-alanine olefin amino acid that is not connected by a crosslinker
  C-term NH2
ALTFAEYWAQAASAA

SEQ ID NO: 590 - protein, 15 aa, Artificial Sequence
  Description of Artificial Sequence: Synthetic peptide
  N-term 5-FAM
  MOD_RES (1)..(1): Beta-Ala
  MOD_RES (5)..(5): Alpha-Me R8-octenyl-alanine olefin amino acid connected by an all-carbon crosslinker comprising one double bond
  misc_feature (5)..(12): Crosslink between residues
  MOD_RES (11)..(11): Cyclobutyl-Ala
  MOD_RES (12)..(12): Alpha-Me S5-pentenyl-alanine olefin amino acid connected by an all-carbon crosslinker comprising one double bond
  C-term NH2
ALTAAEYWAQAASAA

SEQ ID NO: 591 - protein, 15 aa, Artificial Sequence
  Description of Artificial Sequence: Synthetic peptide
  N-term 5-FAM
  MOD_RES (1)..(1): Beta-Ala
  MOD_RES (5)..(5): Alpha-Me R8-octenyl-alanine olefin amino acid connected by an all-carbon crosslinker comprising one double bond
  misc_feature (5)..(12): Crosslink between residues
  MOD_RES (11)..(11): Cyclobutyl-Ala
  MOD_RES (12)..(12): Alpha-Me S5-pentenyl-alanine olefin amino acid connected by an all-carbon crosslinker comprising one double bond
  C-term NH2
ALTFAEYAAQAASAA

SEQ ID NO: 592 - protein, 15 aa, Artificial Sequence
  Description of Artificial Sequence: Synthetic peptide
  N-term 5-FAM
  MOD_RES (1)..(1): Beta-Ala
  MOD_RES (5)..(5): Alpha-Me R8-octenyl-alanine olefin amino acid connected by an all-carbon crosslinker comprising one double bond
  misc_feature (5)..(12): Crosslink between residues
  MOD_RES (11)..(11): Cyclobutyl-Ala
  MOD_RES (12)..(12): Alpha-Me S5-pentenyl-alanine olefin amino acid connected by an all-carbon crosslinker comprising one double bond
  C-term NH2
ALTAAEYAAQAASAA

SEQ ID NO: 593 - protein, 17 aa, Artificial Sequence
  Description of Artificial Sequence: Synthetic peptide
  N-term 5-FAM
  MOD_RES (1)..(1): Beta-Ala
  MOD_RES (8)..(8): Alpha-Me R8-octenyl-alanine olefin amino acid connected by an all-carbon crosslinker comprising one double bond
  misc_feature (8)..(15): Crosslink between residues
  MOD_RES (15)..(15): Alpha-Me S5-pentenyl-alanine olefin amino acid connected by an all-carbon crosslinker comprising one double bond
  C-term NH2
AQSQQTFANLWRLLAQN

SEQ ID NO: 594 - protein, 15 aa, Artificial Sequence
  Description of Artificial Sequence: Synthetic peptide
  N-term 5-TAMRA
  MOD_RES (1)..(1): Beta-Ala
  MOD_RES (5)..(5): Alpha-Me R8-octenyl-alanine olefin amino acid connected by an all-carbon crosslinker comprising one double bond
  misc_feature (5)..(12): Crosslink between residues
  MOD_RES (11)..(11): Cyclobutyl-Ala
  MOD_RES (12)..(12): Alpha-Me S5-pentenyl-alanine olefin amino acid connected by an all-carbon crosslinker comprising one double bond
  C-term NH2
ALTFAEYWAQAASAA

SEQ ID NO: 595 - protein, 15 aa, Artificial Sequence
  Description of Artificial Sequence: Synthetic peptide
  N-term 5-TAMRA
  MOD_RES (1)..(1): Beta-Ala
  MOD_RES (5)..(5): Alpha-Me R8-octenyl-alanine olefin amino acid connected by an all-carbon crosslinker comprising one double bond
  misc_feature (5)..(12): Crosslink between residues
  MOD_RES (11)..(11): Cyclobutyl-Ala
  MOD_RES (12)..(12): Alpha-Me S5-pentenyl-alanine olefin amino acid connected by an all-carbon crosslinker comprising one double bond
  C-term NH2
ALTAAEYWAQAASAA

SEQ ID NO: 596 - protein, 15 aa, Artificial Sequence
  Description of Artificial Sequence: Synthetic peptide
  N-term 5-TAMRA
  MOD_RES (1)..(1): Beta-Ala
  MOD_RES (5)..(5): Alpha-Me R8-octenyl-alanine olefin amino acid connected by an all-carbon crosslinker comprising one double bond
  misc_feature (5)..(12): Crosslink between residues
  MOD_RES (11)..(11): Cyclobutyl-Ala
  MOD_RES (12)..(12): Alpha-Me S5-pentenyl-alanine olefin amino acid connected by an all-carbon crosslinker comprising one double bond
  C-term NH2
ALTFAEYAAQAASAA

SEQ ID NO: 597 - protein, 15 aa, Artificial Sequence
  Description of Artificial Sequence: Synthetic peptide
  N-term 5-TAMRA
  MOD_RES (1)..(1): Beta-Ala
  MOD_RES (5)..(5): Alpha-Me R8-octenyl-alanine olefin amino acid connected by an all-carbon crosslinker comprising one double bond
  misc_feature (5)..(12): Crosslink between residues
  MOD_RES (11)..(11): Cyclobutyl-Ala
  MOD_RES (12)..(12): Alpha-Me S5-pentenyl-alanine olefin amino acid connected by an all-carbon crosslinker comprising one double bond
  C-term NH2
ALTAAEYAAQAASAA

SEQ ID NO: 598 - protein, 15 aa, Artificial Sequence
  Description of Artificial Sequence: Synthetic peptide
  N-term 5-TAMRA
  MOD_RES (1)..(1): Beta-Ala
  MOD_RES (5)..(5): Alpha-Me R8-octenyl-alanine olefin amino acid that is not connected by a crosslinker
  MOD_RES (11)..(11): Cyclobutyl-Ala
  MOD_RES (12)..(12): Alpha-Me S5-pentenyl-alanine olefin amino acid that is not connected by a crosslinker
  C-term NH2
ALTFAEYWAQAASAA

SEQ ID NO: 599 - protein, 18 aa, Artificial Sequence
  Description of Artificial Sequence: Synthetic peptide
  N-term 5-TAMRA
  MOD_RES (1)..(1): Beta-Ala
  MOD_RES (5)..(5): Alpha-Me R8-octenyl-alanine olefin amino acid connected by an all-carbon crosslinker comprising one double bond
  misc_feature (5)..(12): Crosslink between residues
  MOD_RES (12)..(12): Alpha-Me S5-pentenyl-alanine olefin amino acid connected by an all-carbon crosslinker comprising one double bond
  MOD_RES (18)..(18): D-amino acid
  C-term NH2
ALTFAEYWAQLAAAAAAA

SEQ ID NO: 600 - protein, 18 aa, Artificial Sequence
  Description of Artificial Sequence: Synthetic peptide
  N-term 5-TAMRA
  MOD_RES (1)..(1): Beta-Ala
  MOD_RES (5)..(5): Alpha-Me R8-octenyl-alanine olefin amino acid connected by an all-carbon crosslinker comprising one double bond
  misc_feature (5)..(12): Crosslink between residues
  MOD_RES (12)..(12): Alpha-Me S5-pentenyl-alanine olefin amino acid connected by an all-carbon crosslinker comprising one double bond
  MOD_RES (18)..(18): D-amino acid
  C-term NH2
ALTAAEYWAQLAAAAAAA

SEQ ID NO: 601 - protein, 18 aa, Artificial Sequence
  Description of Artificial Sequence: Synthetic peptide
  N-term 5-TAMRA
  MOD_RES (1)..(1): Beta-Ala
  MOD_RES (5)..(5): Alpha-Me R8-octenyl-alanine olefin amino acid that is not connected by a crosslinker
  MOD_RES (12)..(12): Alpha-Me S5-pentenyl-alanine olefin amino acid that is not connected by a crosslinker
  MOD_RES (18)..(18): D-amino acid
  C-term NH2
ALTFAEYWAQLAAAAAAA

SEQ ID NO: 602 - protein, 14 aa, Artificial Sequence
  Description of Artificial Sequence: Synthetic peptide
  N-term Ac
  MOD_RES (4)..(4): Alpha-Me R8-octenyl-alanine olefin amino acid connected by an all-carbon crosslinker comprising one double bond
  misc_feature (4)..(11): Crosslink between residues
  MOD_RES (8)..(8): Cou7
  MOD_RES (10)..(10): Cyclobutyl-Ala
  MOD_RES (11)..(11): Alpha-Me S5-pentenyl-alanine olefin amino acid connected by an all-carbon crosslinker comprising one double bond
  C-term OH
LTFAEYWXQAASAA

SEQ ID NO: 603 - protein, 12 aa, Artificial Sequence
  Description of Artificial Sequence: Synthetic peptide
  N-term Ac
  MOD_RES (4)..(4): Alpha-Me R8-octenyl-alanine olefin amino acid connected by an all-carbon crosslinker comprising one double bond
  misc_feature (4)..(11): Crosslink between residues
  MOD_RES (8)..(8): Cou7
  MOD_RES (10)..(10): Cyclobutyl-Ala
  MOD_RES (11)..(11): Alpha-Me S5-pentenyl-alanine olefin amino acid connected by an all-carbon crosslinker comprising one double bond
  C-term OH
LTFAEYWXQAAS

SEQ ID NO: 604 - protein, 14 aa, Artificial Sequence
  Description of Artificial Sequence: Synthetic peptide
  N-term Ac
  MOD_RES (4)..(4): Alpha-Me R8-octenyl-alanine olefin amino acid connected by an all-carbon crosslinker comprising one double bond
  misc_feature (4)..(11): Crosslink between residues
  MOD_RES (8)..(8): Cou7
  MOD_RES (10)..(10): Cyclobutyl-Ala
  MOD_RES (11)..(11): Alpha-Me S5-pentenyl-alanine olefin amino acid connected by an all-carbon crosslinker comprising one double bond
  C-term NH2
LTAAEYWXQAASAA

SEQ ID NO: 605 - protein, 14 aa, Artificial Sequence
  Description of Artificial Sequence: Synthetic peptide
  N-term Ac
  MOD_RES (4)..(4): Alpha-Me R8-octenyl-alanine olefin amino acid connected by an all-carbon crosslinker comprising one double bond
  misc_feature (4)..(11): Crosslink between residues
  MOD_RES (8)..(8): Cou7
  MOD_RES (10)..(10): Cyclobutyl-Ala
  MOD_RES (11)..(11): Alpha-Me S5-pentenyl-alanine olefin amino acid connected by an all-carbon crosslinker comprising one double bond
  C-term NH2
LTFAEYAXQAASAA

SEQ ID NO: 606 - protein, 14 aa, Artificial Sequence
  Description of Artificial Sequence: Synthetic peptide
  N-term Ac
  MOD_RES (4)..(4): Alpha-Me R8-octenyl-alanine olefin amino acid connected by an all-carbon crosslinker comprising one double bond
  misc_feature (4)..(11): Crosslink between residues
  MOD_RES (8)..(8): Cou7
  MOD_RES (10)..(10): Cyclobutyl-Ala
  MOD_RES (11)..(11): Alpha-Me S5-pentenyl-alanine olefin amino acid connected by an all-carbon crosslinker comprising one double bond
  C-term NH2
LTAAEYAXQAASAA

SEQ ID NO: 607 - protein, 14 aa, Artificial Sequence
  Description of Artificial Sequence: Synthetic peptide
  N-term Ac
  MOD_RES (4)..(4): Alpha-Me R8-octenyl-alanine olefin amino acid that is not connected by a crosslinker
  MOD_RES (8)..(8): Cou7
  MOD_RES (10)..(10): Cyclobutyl-Ala
  MOD_RES (11)..(11): Alpha-Me S5-pentenyl-alanine olefin amino acid that is not connected by a crosslinker
  C-term NH2
LTFAEYWXQAASAA

SEQ ID NO: 608 - protein, 17 aa, Artificial Sequence
  Description of Artificial Sequence: Synthetic peptide
  N-term Ac
  MOD_RES (4)..(4): Alpha-Me R8-octenyl-alanine olefin amino acid connected by an all-carbon crosslinker comprising one double bond
  misc_feature (4)..(11): Crosslink between residues
  MOD_RES (8)..(8): Cou7
  MOD_RES (11)..(11): Alpha-Me S5-pentenyl-alanine olefin amino acid connected by an all-carbon crosslinker comprising one double bond
  MOD_RES (17)..(17): D-amino acid
  C-term NH2
LTFAEYWXQLAAAAAAA

SEQ ID NO: 609 - protein, 17 aa, Artificial Sequence
  Description of Artificial Sequence: Synthetic peptide
  N-term Ac
  MOD_RES (4)..(4): Alpha-Me R8-octenyl-alanine olefin amino acid that is not connected by a crosslinker
  MOD_RES (8)..(8): Cou7
  MOD_RES (11)..(11): Alpha-Me S5-pentenyl-alanine olefin amino acid that is not connected by a crosslinker
  MOD_RES (17)..(17): D-amino acid
  C-term NH2
LTFAEYWXQLAAAAAAA

SEQ ID NO: 610 - protein, 16 aa, Artificial Sequence
  Description of Artificial Sequence: Synthetic peptide
  N-term Ac
  MOD_RES (4)..(4): Alpha-Me R8-octenyl-alanine olefin amino acid connected by an all-carbon crosslinker comprising one double bond
  misc_feature (4)..(11): Crosslink between residues
  MOD_RES (8)..(8): Cou7
  MOD_RES (11)..(11): Alpha-Me S5-pentenyl-alanine olefin amino acid connected by an all-carbon crosslinker comprising one double bond
  C-term OH
LTFAEYWXQLAAAAAA

SEQ ID NO: 611 - protein, 15 aa, Artificial Sequence
  Description of Artificial Sequence: Synthetic peptide
  N-term Ac
  MOD_RES (4)..(4): Alpha-Me R8-octenyl-alanine olefin amino acid connected by an all-carbon crosslinker comprising one double bond
  misc_feature (4)..(11): Crosslink between residues
  MOD_RES (8)..(8): Cou7
  MOD_RES (11)..(11): Alpha-Me S5-pentenyl-alanine olefin amino acid connected by an all-carbon crosslinker comprising one double bond
  C-term OH
LTFAEYWXQLAAAAA

SEQ ID NO: 612 - protein, 14 aa, Artificial Sequence
  Description of Artificial Sequence: Synthetic peptide
  N-term Ac
  MOD_RES (4)..(4): Alpha-Me R8-octenyl-alanine olefin amino acid connected by an all-carbon crosslinker comprising one double bond
  misc_feature (4)..(11): Crosslink between residues
  MOD_RES (8)..(8): Cou7
  MOD_RES (11)..(11): Alpha-Me S5-pentenyl-alanine olefin amino acid connected by an all-carbon crosslinker comprising one double bond
  C-term OH
LTFAEYWXQLAAAA

SEQ ID NO: 613 - protein, 13 aa, Artificial Sequence
  Description of Artificial Sequence: Synthetic peptide
  N-term Ac
  MOD_RES (4)..(4): Alpha-Me R8-octenyl-alanine olefin amino acid connected by an all-carbon crosslinker comprising one double bond
  misc_feature (4)..(11): Crosslink between residues
  MOD_RES (8)..(8): Cou7
  MOD_RES (11)..(11): Alpha-Me S5-pentenyl-alanine olefin amino acid connected by an all-carbon crosslinker comprising one double bond
  C-term OH
LTFAEYWXQLAAA

SEQ ID NO: 614 - protein, 12 aa, Artificial Sequence
  Description of Artificial Sequence: Synthetic peptide
  N-term Ac
  MOD_RES (4)..(4): Alpha-Me R8-octenyl-alanine olefin amino acid connected by an all-carbon crosslinker comprising one double bond
  misc_feature (4)..(11): Crosslink between residues
  MOD_RES (8)..(8): Cou7
  MOD_RES (11)..(11): Alpha-Me S5-pentenyl-alanine olefin amino acid connected by an all-carbon crosslinker comprising one double bond
  C-term OH
LTFAEYWXQLAA

SEQ ID NO: 615 - protein, 17 aa, Artificial Sequence
  Description of Artificial Sequence: Synthetic peptide
  N-term Ac
  MOD_RES (4)..(4): Alpha-Me R8-octenyl-alanine olefin amino acid connected by an all-carbon crosslinker comprising one double bond
  misc_feature (4)..(11): Crosslink between residues
  MOD_RES (11)..(11): Alpha-Me S5-pentenyl-alanine olefin amino acid connected by an all-carbon crosslinker comprising one double bond
  MOD_RES (17)..(17): D-amino acid
  C-term NH2
LTFAEYWAQLAAAAASA

SEQ ID NO: 616 - protein, 17 aa, Artificial Sequence
  Description of Artificial Sequence: Synthetic peptide
  N-term Ac
  MOD_RES (4)..(4): Alpha-Me R8-octenyl-alanine olefin amino acid connected by an all-carbon crosslinker comprising one double bond
  misc_feature (4)..(11): Crosslink between residues
  MOD_RES (11)..(11): Alpha-Me S5-pentenyl-alanine olefin amino acid connected by an all-carbon crosslinker comprising one double bond
  MOD_RES (17)..(17): D-amino acid
  C-term NH2
LTFAAYWAALAAAAAAA

SEQ ID NO: 617 - protein, 18 aa, Artificial Sequence
  Description of Artificial Sequence: Synthetic peptide
  N-term Biotin
  MOD_RES (1)..(1): Beta-Ala
  MOD_RES (5)..(5): Alpha-Me R8-octenyl-alanine olefin amino acid connected by an all-carbon crosslinker comprising one double bond
  misc_feature (5)..(12): Crosslink between residues
  MOD_RES (12)..(12): Alpha-Me S5-pentenyl-alanine olefin amino acid connected by an all-carbon crosslinker comprising one double bond
  MOD_RES (18)..(18): D-amino acid
  C-term NH2
ALTFAEYWAQLAAAAAAA

SEQ ID NO: 618 - protein, 12 aa, Artificial Sequence
  Description of Artificial Sequence: Synthetic peptide
  N-term Ac
  MOD_RES (4)..(4): Alpha-Me R8-octenyl-alanine olefin amino acid connected by an all-carbon crosslinker comprising one double bond
  misc_feature (4)..(11): Crosslink between residues
  MOD_RES (11)..(11): Alpha-Me S5-pentenyl-alanine olefin amino acid connected by an all-carbon crosslinker comprising one double bond
  C-term NH2
LTFAHAWAQLAS

SEQ ID NO: 619 - protein, 13 aa, Artificial Sequence
  Description of Artificial Sequence: Synthetic peptide
  N-term Ac
  MOD_RES (4)..(4): Alpha-Me R8-octenyl-alanine olefin amino acid connected by an all-carbon crosslinker comprising one double bond
  misc_feature (4)..(11): Crosslink between residues
  MOD_RES (10)..(10): Cyclobutyl-Ala
  MOD_RES (11)..(11): Alpha-Me S5-pentenyl-alanine olefin amino acid connected by an all-carbon crosslinker comprising one double bond
  C-term NH2
LTFAEYWAQAASA

SEQ ID NO: 620 - protein, 14 aa, Artificial Sequence
  Description of Artificial Sequence: Synthetic peptide
  N-term Ac
  MOD_RES (4)..(4): Alpha-Me R8-octenyl-alanine olefin amino acid connected by an all-carbon crosslinker comprising one double bond
  misc_feature (4)..(11): Crosslink between residues
  MOD_RES (10)..(10): Cyclobutyl-Ala
  MOD_RES (11)..(11): Alpha-Me S5-pentenyl-alanine olefin amino acid connected by an all-carbon crosslinker comprising one double bond
  C-term NH2
LTFAHYWAQAASAA

SEQ ID NO: 621 - protein, 14 aa, Artificial Sequence
  Description of Artificial Sequence: Synthetic peptide
  N-term Ac
  MOD_RES (4)..(4): Alpha-Me R8-octenyl-alanine olefin amino acid connected by an all-carbon crosslinker comprising one double bond
  misc_feature (4)..(11): Crosslink between residues
  MOD_RES (10)..(10): Cyclobutyl-Ala
  MOD_RES (11)..(11): Alpha-Me S5-pentenyl-alanine olefin amino acid connected by an all-carbon crosslinker comprising one double bond
  C-term NH2
LTFASYWAQAASAA

SEQ ID NO: 622 - protein, 14 aa, Artificial Sequence
  Description of Artificial Sequence: Synthetic peptide
  N-term Ac
  MOD_RES (4)..(4): Alpha-Me R8-octenyl-alanine olefin amino acid connected by an all-carbon crosslinker comprising one double bond
  misc_feature (4)..(11): Crosslink between residues
  MOD_RES (10)..(10): Cyclobutyl-Ala
  MOD_RES (11)..(11): Alpha-Me S5-pentenyl-alanine olefin amino acid connected by an all-carbon crosslinker comprising one double bond
  C-term NH2
LTFARYWAQAASAA

SEQ ID NO: 623 - protein, 14 aa, Artificial Sequence
  Description of Artificial Sequence: Synthetic peptide
  N-term Ac
  MOD_RES (4)..(4): Alpha-Me R8-octenyl-alanine olefin amino acid connected by an all-carbon crosslinker comprising one double bond
  misc_feature (4)..(11): Crosslink between residues
  MOD_RES (10)..(10): Cyclobutyl-Ala
  MOD_RES (11)..(11): Alpha-Me S5-pentenyl-alanine olefin amino acid connected by an all-carbon crosslinker comprising one double bond
  C-term NH2
LTFAKYWAQAASAA

SEQ ID NO: 624 - protein, 14 aa, Artificial Sequence
  Description of Artificial Sequence: Synthetic peptide
  N-term Ac
  MOD_RES (4)..(4): Alpha-Me R8-octenyl-alanine olefin amino acid connected by an all-carbon crosslinker comprising one double bond
  misc_feature (4)..(11): Crosslink between residues
  MOD_RES (10)..(10): Cyclobutyl-Ala
  MOD_RES (11)..(11): Alpha-Me S5-pentenyl-alanine olefin amino acid connected by an all-carbon crosslinker comprising one double bond
  C-term NH2
LTFAEYWAQAAAAA

SEQ ID NO: 625 - protein, 19 aa, Artificial Sequence
  Description of Artificial Sequence: Synthetic peptide
  N-term Ac
  MOD_RES (4)..(4): Alpha-Me R8-octenyl-alanine olefin amino acid connected by an all-carbon crosslinker comprising one double bond
  misc_feature (4)..(11): Crosslink between residues
  MOD_RES (11)..(11): Alpha-Me S5-pentenyl-alanine olefin amino acid connected by an all-carbon crosslinker comprising one double bond
  MOD_RES (17)..(17): D-amino acid
  MOD_RES (18)..(18): Beta-Ala
  C-term NH2
LTFAEYWAQLAAAAAAAAC

SEQ ID NO: 626 - protein, 19 aa, Artificial Sequence
  Description of Artificial Sequence: Synthetic peptide
  N-term Ac
  MOD_RES (4)..(4): Alpha-Me R8-octenyl-alanine olefin amino acid connected by an all-carbon crosslinker comprising one double bond
  misc_feature (4)..(11): Crosslink between residues
  MOD_RES (11)..(11): Alpha-Me S5-pentenyl-alanine olefin amino acid connected by an all-carbon crosslinker comprising one double bond
  MOD_RES (17)..(18): D-amino acid
  MOD_RES (19)..(19): Peg4C
  C-term NH2
LTFAEYWAQLAAAAAAADC

SEQ ID NO: 627 - protein, 17 aa, Artificial Sequence
  Description of Artificial Sequence: Synthetic peptide
  N-term Ac
  MOD_RES (4)..(4): Alpha-Me R8-octenyl-alanine olefin amino acid connected by an all-carbon crosslinker comprising one double bond
  misc_feature (4)..(11): Crosslink between residues
  MOD_RES (11)..(11): Alpha-Me S5-pentenyl-alanine olefin amino acid connected by an all-carbon crosslinker comprising one double bond
  MOD_RES (17)..(17): D-amino acid
  C-term NH2
LTAAAYWAALAAAAAAA

SEQ ID NO: 628 - protein, 17 aa, Artificial Sequence
  Description of Artificial Sequence: Synthetic peptide
  N-term Ac
  MOD_RES (4)..(4): Alpha-Me R8-octenyl-alanine olefin amino acid connected by an all-carbon crosslinker comprising one double bond
  misc_feature (4)..(11): Crosslink between residues
  MOD_RES (11)..(11): Alpha-Me S5-pentenyl-alanine olefin amino acid connected by an all-carbon crosslinker comprising one double bond
  MOD_RES (17)..(17): D-amino acid
  C-term NH2
LTFAAYAAALAAAAAAA

SEQ ID NO: 629 - protein, 18 aa, Artificial Sequence
  Description of Artificial Sequence: Synthetic peptide
  N-term 5-FAM
  MOD_RES (1)..(1): Beta-Ala
  MOD_RES (5)..(5): Alpha-Me R8-octenyl-alanine olefin amino acid connected by an all-carbon crosslinker comprising one double bond
  misc_feature (5)..(12): Crosslink between residues
  MOD_RES (12)..(12): Alpha-Me S5-pentenyl-alanine olefin amino acid connected by an all-carbon crosslinker comprising one double bond
  MOD_RES (18)..(18): D-amino acid
  C-term NH2
ALTFAAYWAALAAAAAAA

SEQ ID NO: 630 - protein, 17 aa, Artificial Sequence
  Description of Artificial Sequence: Synthetic peptide
  N-term Ac
  MOD_RES (4)..(4): Alpha-Me R8-octenyl-alanine olefin amino acid connected by an all-carbon crosslinker comprising one double bond
  misc_feature (4)..(11): Crosslink between residues
  MOD_RES (11)..(11): Alpha-Me S5-pentenyl-alanine olefin amino acid connected by an all-carbon crosslinker comprising one double bond
  MOD_RES (17)..(17): D-amino acid
  C-term NH2
LTAAAYWAQLAAAAAAA

SEQ ID NO: 631 - protein, 17 aa, Artificial Sequence
  Description of Artificial Sequence: Synthetic peptide
  N-term Ac
  MOD_RES (4)..(4): Alpha-Me R8-octenyl-alanine olefin amino acid connected by an all-carbon crosslinker comprising one double bond
  misc_feature (4)..(11): Crosslink between residues
  MOD_RES (11)..(11): Alpha-Me S5-pentenyl-alanine olefin amino acid connected by an all-carbon crosslinker comprising one double bond
  MOD_RES (17)..(17): D-amino acid
  C-term NH2
LTFAAYAAQLAAAAAAA

SEQ ID NO: 632 - protein, 17 aa, Artificial Sequence
  Description of Artificial Sequence: Synthetic peptide
  N-term Ac
  MOD_RES (4)..(4): Alpha-Me R6-hexynyl-alanine alkynyl amino acids, crosslinke via a dialkyne bond with a second alkynyl amino acid
  misc_feature (4)..(11): Crosslink between residues
  MOD_RES (11)..(11): Alpha-Me S5-pentynyl-alanine alkynyl amino acids, wherein the alkyne forms one half of a dialkyne bond with a second alkynyl amino acid
  MOD_RES (17)..(17): D-amino acid
  C-term NH2
LTFAAYWAALAAAAAAA

SEQ ID NO: 633 - protein, 18 aa, Artificial Sequence
  Description of Artificial Sequence: Synthetic peptide
  N-term FITC
  MOD_RES (1)..(1): Beta-Ala
  MOD_RES (5)..(5): Alpha-Me R8-octenyl-alanine olefin amino acid connected by an all-carbon crosslinker comprising one double bond
  misc_feature (5)..(12): Crosslink between residues
  MOD_RES (12)..(12): Alpha-Me S5-pentenyl-alanine olefin amino acid connected by an all-carbon crosslinker comprising one double bond
  MOD_RES (18)..(18): D-amino acid
  C-term NH2
ALTFAEYWAQLAAAAAAA

SEQ ID NO: 634 - protein, 15 aa, Artificial Sequence
  Description of Artificial Sequence: Synthetic peptide
  N-term FITC
  MOD_RES (1)..(1): Beta-Ala
  MOD_RES (5)..(5): Alpha-Me R8-octenyl-alanine olefin amino acid connected by an all-carbon crosslinker comprising one double bond
  misc_feature (5)..(12): Crosslink between residues
  MOD_RES (11)..(11): Cyclobutyl-Ala
  MOD_RES (12)..(12): Alpha-Me S5-pentenyl-alanine olefin amino acid connected by an all-carbon crosslinker comprising one double bond
  C-term NH2
ALTFAEYWAQAASAA

SEQ ID NO: 635 - protein, 17 aa, Artificial Sequence
  Description of Artificial Sequence: Synthetic peptide
  N-term Ac
  MOD_RES (4)..(4): Alpha-Me R8-octenyl-alanine olefin amino acid connected by an all-carbon crosslinker comprising one double bond
  misc_feature (4)..(11): Crosslink between residues
  MOD_RES (11)..(11): Alpha-Me S5-pentenyl-alanine olefin amino acid connected by an all-carbon crosslinker comprising one double bond
  MOD_RES (17)..(17): D-amino acid
  C-term NH2
LTFAEYWAQLAEAAAAA

SEQ ID NO: 636 - protein, 17 aa, Artificial Sequence
  Description of Artificial Sequence: Synthetic peptide
  N-term Ac
  MOD_RES (4)..(4): Alpha-Me R8-octenyl-alanine olefin amino acid connected by an all-carbon crosslinker comprising one double bond
  misc_feature (4)..(11): Crosslink between residues
  MOD_RES (11)..(11): Alpha-Me S5-pentenyl-alanine olefin amino acid connected by an all-carbon crosslinker comprising one double bond
  MOD_RES (17)..(17): D-amino acid
  C-term NH2
LTFAAYWAQLAEAAAAA

SEQ ID NO: 637 - protein, 19 aa, Artificial Sequence
  Description of Artificial Sequence: Synthetic peptide
  N-term Ac
  MOD_RES (4)..(4): Alpha-Me R8-octenyl-alanine olefin amino acid connected by an all-carbon crosslinker comprising one double bond
  misc_feature (4)..(11): Crosslink between residues
  MOD_RES (11)..(11): Alpha-Me S5-pentenyl-alanine olefin amino acid connected by an all-carbon crosslinker comprising one double bond
  MOD_RES (17)..(17): D-amino acid
  MOD_RES (18)..(18): Beta-Ala
  MOD_RES (19)..(19): Lys-bio
  C-term NH2
LTFAEYWAQLAAAAAAAAK

SEQ ID NO: 638 - protein, 17 aa, Artificial Sequence
  Description of Artificial Sequence: Synthetic peptide
  N-term Ac
  MOD_RES (4)..(4): Alpha-Me R8-octenyl-alanine olefin amino acid connected by an all-carbon crosslinker comprising one double bond
  misc_feature (4)..(11): Crosslink between residues
  MOD_RES (11)..(11): Alpha-Me S5-pentenyl-alanine olefin amino acid connected by an all-carbon crosslinker comprising one double bond
  MOD_RES (17)..(17): D-amino acid
  C-term NH2
LTFAAYWAALAAAAAAA

SEQ ID NO: 639 - protein, 17 aa, Artificial Sequence
  Description of Artificial Sequence: Synthetic peptide
  N-term Ac
  MOD_RES (4)..(4): Alpha-Me R8-octenyl-alanine olefin amino acid connected by an all-carbon crosslinker comprising one double bond
  misc_feature (4)..(11): Crosslink between residues
  MOD_RES (11)..(11): Alpha-Me S5-pentenyl-alanine olefin amino acid connected by an all-carbon crosslinker comprising one double bond
  MOD_RES (17)..(17): D-amino acid
  C-term NH2
LTFAAYAAALAAAAAAA

SEQ ID NO: 640 - protein, 17 aa, Artificial Sequence
  Description of Artificial Sequence: Synthetic peptide
  N-term Ac
  MOD_RES (4)..(4): Alpha-Me R8-octenyl-alanine olefin amino acid connected by an all-carbon crosslinker comprising one double bond
  misc_feature (4)..(11): Crosslink between residues
  MOD_RES (11)..(11): Alpha-Me S5-pentenyl-alanine olefin amino acid connected by an all-carbon crosslinker comprising one double bond
  MOD_RES (17)..(17): D-amino acid
  C-term NH2
LTFAAYAAQLAAAAAAA

SEQ ID NO: 641 - protein, 17 aa, Artificial Sequence
  Description of Artificial Sequence: Synthetic peptide
  N-term Ac
  MOD_RES (4)..(4): Alpha-Me R8-octenyl-alanine olefin amino acid connected by an all-carbon crosslinker comprising one double bond
  misc_feature (4)..(11): Crosslink between residues
  MOD_RES (11)..(11): Alpha-Me S5-pentenyl-alanine olefin amino acid connected by an all-carbon crosslinker comprising one double bond
  MOD_RES (17)..(17): D-amino acid
  C-term NH2
LTFAEYWAQLAEAAAAA

SEQ ID NO: 642 - protein, 17 aa, Artificial Sequence
  Description of Artificial Sequence: Synthetic peptide
  N-term Ac
  MOD_RES (4)..(4): Alpha-Me R8-octenyl-alanine olefin amino acid connected by an all-carbon crosslinker comprising one double bond
  misc_feature (4)..(11): Crosslink between residues
  MOD_RES (11)..(11): Alpha-Me S5-pentenyl-alanine olefin amino acid connected by an all-carbon crosslinker comprising one double bond
  MOD_RES (17)..(17): D-amino acid
  C-term NH2
LTFAAYWAQLAEAAAAA

SEQ ID NO: 643 - protein, 17 aa, Artificial Sequence
  Description of Artificial Sequence: Synthetic peptide
  N-term Ac
  MOD_RES (4)..(4): Alpha-Me R8-octenyl-alanine olefin amino acid connected by an all-carbon crosslinker comprising one double bond
  misc_feature (4)..(11): Crosslink between residues
  MOD_RES (10)..(10): Cyclobutyl-Ala
  MOD_RES (11)..(11): Alpha-Me S5-pentenyl-alanine olefin amino acid connected by an all-carbon crosslinker comprising one double bond
  MOD_RES (17)..(17): D-amino acid
  C-term NH2
LTFAEYWAQAASAAAAA

SEQ ID NO: 644 - protein, 17 aa, Artificial Sequence
  Description of Artificial Sequence: Synthetic peptide
  N-term Ac
  MOD_RES (4)..(4): Alpha-Me R8-octenyl-alanine olefin amino acid connected by an all-carbon crosslinker comprising one double bond
  misc_feature (4)..(15): Crosslink between residues
  MOD_RES (11)..(11): Two pentenyl-alanine olefin side chains, each of which is crosslinked to another amino acid as indicated
  MOD_RES (15)..(15): Alpha-Me R5-pentenyl-alanine olefin amino acid connected by an all-carbon crosslinker comprising one double bond
  C-term NH2
LTFAEYWAQLAAAAAAA

SEQ ID NO: 645 - protein, 18 aa, Artificial Sequence
  Description of Artificial Sequence: Synthetic peptide
  N-term Ac
  MOD_RES (4)..(4): Alpha-Me R8-octenyl-alanine olefin amino acid connected by an all-carbon crosslinker comprising one double bond
  misc_feature (4)..(11): Crosslink between residues
  MOD_RES (11)..(11): Alpha-Me S5-pentenyl-alanine olefin amino acid connected by an all-carbon crosslinker comprising one double bond
  MOD_RES (13)..(13): Alpha-Me S5-pentenyl-alanine olefin amino acid connected by an all-carbon crosslinker comprising one double bond
  misc_feature (13)..(17): Crosslink between residues
  MOD_RES (17)..(17): Alpha-Me S5-pentenyl-alanine olefin amino acid connected by an all-carbon crosslinker comprising one double bond
  C-term NH2
LTFAEYWAQLAAAAAAAA

SEQ ID NO: 646 - protein, 19 aa, Artificial Sequence
  Description of Artificial Sequence: Synthetic peptide
  N-term Ac
  MOD_RES (4)..(4): Alpha-Me R8-octenyl-alanine olefin amino acid connected by an all-carbon crosslinker comprising one double bond
  misc_feature (4)..(11): Crosslink between residues
  MOD_RES (11)..(11): Alpha-Me S5-pentenyl-alanine olefin amino acid connected by an all-carbon crosslinker comprising one double bond
  MOD_RES (14)..(14): Alpha-Me S5-pentenyl-alanine olefin amino acid connected by an all-carbon crosslinker comprising one double bond
  misc_feature (14)..(18): Crosslink between residues
  MOD_RES (18)..(18): Alpha-Me S5-pentenyl-alanine olefin amino acid connected by an all-carbon crosslinker comprising one double bond
  C-term NH2
LTFAEYWAQLAAAAAAAAA

SEQ ID NO: 647 - protein, 20 aa, Artificial Sequence
  Description of Artificial Sequence: Synthetic peptide
  N-term Ac
  MOD_RES (4)..(4): Alpha-Me R8-octenyl-alanine olefin amino acid connected by an all-carbon crosslinker comprising one double bond
  misc_feature (4)..(11): Crosslink between residues
  MOD_RES (11)..(11): Alpha-Me S5-pentenyl-alanine olefin amino acid connected by an all-carbon crosslinker comprising one double bond
  MOD_RES (15)..(15): Alpha-Me S5-pentenyl-alanine olefin amino acid connected by an all-carbon crosslinker comprising one double bond
  misc_feature (15)..(19): Crosslink between residues
  MOD_RES (19)..(19): Alpha-Me S5-pentenyl-alanine olefin amino acid connected by an all-carbon crosslinker comprising one double bond
  C-term NH2
LTFAEYWAQLAAAAAAAAAA

SEQ ID NO: 648 - protein, 17 aa, Artificial Sequence
  Description of Artificial Sequence: Synthetic peptide
  N-term Ac
  MOD_RES (7)..(7): Alpha-Me R8-octenyl-alanine olefin amino acid connected by an all-carbon crosslinker comprising one double bond
  misc_feature (7)..(14): Crosslink between residues
  MOD_RES (14)..(14): Alpha-Me S5-pentenyl-alanine olefin amino acid connected by an all-carbon crosslinker comprising one double bond
  C-term OH
AAALTFAEYWAQLAAAA

SEQ ID NO: 649 - protein, 17 aa, Artificial Sequence
  Description of Artificial Sequence: Synthetic peptide
  N-term Ac
  MOD_RES (7)..(7): Alpha-Me R8-octenyl-alanine olefin amino acid connected by an all-carbon crosslinker comprising one double bond
  misc_feature (7)..(14): Crosslink between residues
  MOD_RES (14)..(14): Alpha-Me S5-pentenyl-alanine olefin amino acid connected by an all-carbon crosslinker comprising one double bond
  C-term NH2
AAALTFAEYWAQLAAAA

SEQ ID NO: 650 - protein, 18 aa, Artificial Sequence
  Description of Artificial Sequence: Synthetic peptide
  N-term Ac
  MOD_RES (8)..(8): Alpha-Me R8-octenyl-alanine olefin amino acid connected by an all-carbon crosslinker comprising one double bond
  misc_feature (8)..(15): Crosslink between residues
  MOD_RES (15)..(15): Alpha-Me S5-pentenyl-alanine olefin amino acid connected by an all-carbon crosslinker comprising one double bond
  C-term NH2
AAAALTFAEYWAQLAAAA

SEQ ID NO: 651 - protein, 19 aa, Artificial Sequence
  Description of Artificial Sequence: Synthetic peptide
  N-term Ac
  MOD_RES (9)..(9): Alpha-Me R8-octenyl-alanine olefin amino acid connected by an all-carbon crosslinker comprising one double bond
  misc_feature (9)..(16): Crosslink between residues
  MOD_RES (16)..(16): Alpha-Me S5-pentenyl-alanine olefin amino acid connected by an all-carbon crosslinker comprising one double bond
  C-term NH2
AAAAALTFAEYWAQLAAAA

SEQ ID NO: 652 - protein, 20 aa, Artificial Sequence
  Description of Artificial Sequence: Synthetic peptide
  N-term Ac
  MOD_RES (10)..(10): Alpha-Me R8-octenyl-alanine olefin amino acid connected by an all-carbon crosslinker comprising one double bond
  misc_feature (10)..(17): Crosslink between residues
  MOD_RES (17)..(17): Alpha-Me S5-pentenyl-alanine olefin amino acid connected by an all-carbon crosslinker comprising one double bond
  C-term NH2
AAAAAALTFAEYWAQLAAAA

SEQ ID NO: 653 - protein, 14 aa, Artificial Sequence
  Description of Artificial Sequence: Synthetic peptide
  N-term Ac
  MOD_RES (4)..(4): Alpha-Me R6-hexynyl-alanine alkynyl amino acids, crosslinke via a dialkyne bond with a second alkynyl amino acid
  misc_feature (4)..(11): Crosslink between residues
  MOD_RES (10)..(10): Cyclobutyl-Ala
  MOD_RES (11)..(11): Alpha-Me S6-hexynyl-alanine alkynyl amino acid wherein the alkyne forms one half of a dialkyne bond with a second alkynyl amino acid
  C-term NH2
LTFAEYWAQAASAA

SEQ ID NO: 654 - protein, 12 aa, Artificial Sequence
  Description of Artificial Sequence: Synthetic peptide
  N-term Ac
  MOD_RES (1)..(1): D-amino acid
  MOD_RES (2)..(2): Alpha-Me R5-pentenyl-alanine olefin amino acid connected by an all-carbon crosslinker comprising one double bond
  misc_feature (2)..(6): Crosslink between residues
  MOD_RES (3)..(5): D-amino acid
  MOD_RES (6)..(6): Alpha-Me R5-pentenyl-alanine olefin amino acid connected by an all-carbon crosslinker comprising one double bond
  MOD_RES (7)..(7): D-Phe-4CF3
  MOD_RES (8)..(12): D-amino acid
  C-term NH2
TAWYAAFEKLLR

SEQ ID NO: 655 - protein, 12 aa, Artificial Sequence
  Description of Artificial Sequence: Synthetic peptide
  N-term Ac
  MOD_RES (1)..(4): D-amino acid
  MOD_RES (5)..(5): Alpha-Me R5-pentenyl-alanine olefin amino acid connected by an all-carbon crosslinker comprising one double bond
  misc_feature (5)..(9): Crosslink between residues
  MOD_RES (6)..(6): D-amino acid
  MOD_RES (7)..(7): D-Phe-4CF3
  MOD_RES (8)..(8): D-amino acid
  MOD_RES (9)..(9): Alpha-Me R5-pentenyl-alanine olefin amino acid connected by an all-carbon crosslinker comprising one double bond
  MOD_RES (10)..(12): D-amino acid
  C-term NH2
TAWYANFEALLR

SEQ ID NO: 656 - protein, 12 aa, Artificial Sequence
  Description of Artificial Sequence: Synthetic peptide
  N-term Ac
  MOD_RES (1)..(5): D-amino acid
  MOD_RES (6)..(6): Alpha-Me R5-pentenyl-alanine olefin amino acid connected by an all-carbon crosslinker comprising one double bond
  misc_feature (6)..(10): Crosslink between residues
  MOD_RES (7)..(7): D-Phe-4CF3
  MOD_RES (8)..(9): D-amino acid
  MOD_RES (10)..(10): Alpha-Me R5-pentenyl-alanine olefin amino acid connected by an all-carbon crosslinker comprising one double bond
  MOD_RES (11)..(12): D-amino acid
  C-term NH2
TAWYAAFEKALR

SEQ ID NO: 657 - protein, 14 aa, Artificial Sequence
  Description of Artificial Sequence: Synthetic peptide
  N-term Ac
  MOD_RES (1)..(6): D-amino acid
  MOD_RES (7)..(7): D-Phe-4CF3
  MOD_RES (8)..(8): D-amino acid
  MOD_RES (9)..(9): Alpha-Me R5-pentenyl-alanine olefin amino acid connected by an all-carbon crosslinker comprising one double bond
  misc_feature (9)..(13): Crosslink between residues
  MOD_RES (10)..(12): D-amino acid
  MOD_RES (13)..(13): Alpha-Me R5-pentenyl-alanine olefin amino acid connected by an all-carbon crosslinker comprising one double bond
  MOD_RES (14)..(14): D-amino acid
  C-term NH2
TAWYANFEALLRAA

SEQ ID NO: 658 - protein, 12 aa, Artificial Sequence
  Description of Artificial Sequence: Synthetic peptide
  N-term Ac
  MOD_RES (1)..(1): D-amino acid
  MOD_RES (2)..(2): Alpha-Me S8-octenyl-alanine olefin amino acid connected by an all-carbon crosslinker comprising one double bond
  misc_feature (2)..(9): Crosslink between residues
  MOD_RES (3)..(6): D-amino acid
  MOD_RES (7)..(7): D-Phe-4CF3
  MOD_RES (8)..(8): D-amino acid
  MOD_RES (9)..(9): Alpha-Me R5-pentenyl-alanine olefin amino acid connected by an all-carbon crosslinker comprising one double bond
  MOD_RES (10)..(12): D-amino acid
  C-term NH2
TAWYANFEALLR

SEQ ID NO: 659 - protein, 13 aa, Artificial Sequence
  Description of Artificial Sequence: Synthetic peptide
  N-term Ac
  MOD_RES (1)..(4): D-amino acid
  MOD_RES (5)..(5): Alpha-Me S8-octenyl-alanine olefin amino acid connected by an all-carbon crosslinker comprising one double bond
  misc_feature (5)..(12): Crosslink between residues
  MOD_RES (6)..(6): D-amino acid
  MOD_RES (7)..(7): D-Phe-4CF3
  MOD_RES (8)..(11): D-amino acid
  MOD_RES (12)..(12): Alpha-Me R5-pentenyl-alanine olefin amino acid connected by an all-carbon crosslinker comprising one double bond
  MOD_RES (13)..(13): D-amino acid
  C-term NH2
TAWYANFEKLLAA

SEQ ID NO: 660 - protein, 14 aa, Artificial Sequence
  Description of Artificial Sequence: Synthetic peptide
  N-term Ac
  MOD_RES (1)..(5): D-amino acid
  MOD_RES (6)..(6): Alpha-Me S8-octenyl-alanine olefin amino acid connected by an all-carbon crosslinker comprising one double bond
  misc_feature (6)..(13): Crosslink between residues
  MOD_RES (7)..(7): D-Phe-4CF3
  MOD_RES (8)..(12): D-amino acid
  MOD_RES (13)..(13): Alpha-Me R5-pentenyl-alanine olefin amino acid connected by an all-carbon crosslinker comprising one double bond
  MOD_RES (14)..(14): D-amino acid
  C-term NH2
TAWYAAFEKLLRAA

SEQ ID NO: 661 - protein, 13 aa, Artificial Sequence
  Description of Artificial Sequence: Synthetic peptide
  N-term Ac
  MOD_RES (1)..(4): D-amino acid
  MOD_RES (5)..(5): Alpha-Me S8-octenyl-alanine olefin amino acid connected by an all-carbon crosslinker comprising one double bond
  misc_feature (5)..(12): Crosslink between residues
  MOD_RES (6)..(11): D-amino acid
  MOD_RES (12)..(12): Alpha-Me R5-pentenyl-alanine olefin amino acid connected by an all-carbon crosslinker comprising one double bond
  MOD_RES (13)..(13): D-amino acid
  C-term NH2
TAWYANAEKLLAA

SEQ ID NO: 662 - protein, 14 aa, Artificial Sequence
  Description of Artificial Sequence: Synthetic peptide
  N-term 5-FAM
  MOD_RES (1)..(1): Beta-Ala
  MOD_RES (2)..(5): D-amino acid
  MOD_RES (6)..(6): Alpha-Me S8-octenyl-alanine olefin amino acid connected by an all-carbon crosslinker comprising one double bond
  misc_feature (6)..(13): Crosslink between residues
  MOD_RES (7)..(7): D-amino acid
  MOD_RES (8)..(8): D-Phe-4CF3
  MOD_RES (9)..(12): D-amino acid
  MOD_RES (13)..(13): Alpha-Me R5-pentenyl-alanine olefin amino acid connected by an all-carbon crosslinker comprising one double bond
  MOD_RES (14)..(14): D-amino acid
  C-term NH2
ATAWYANFEKLLAA

SEQ ID NO: 663 - protein, 14 aa, Artificial Sequence
  Description of Artificial Sequence: Synthetic peptide
  N-term 5-FAM
  MOD_RES (1)..(1): Beta-Ala
  MOD_RES (2)..(5): D-amino acid
  MOD_RES (6)..(6): Alpha-Me S8-octenyl-alanine olefin amino acid connected by an all-carbon crosslinker comprising one double bond
  misc_feature (6)..(13): Crosslink between residues
  MOD_RES (7)..(12): D-amino acid
  MOD_RES (13)..(13): Alpha-Me R5-pentenyl-alanine olefin amino acid connected by an all-carbon crosslinker comprising one double bond
  MOD_RES (14)..(14): D-amino acid
  C-term NH2
ATAWYANAEKLLAA

SEQ ID NO: 664 - protein, 13 aa, Artificial Sequence
  Description of Artificial Sequence: Synthetic peptide
  N-term Ac
  MOD_RES (1)..(4): D-amino acid
  MOD_RES (5)..(5): Alpha-Me S8-octenyl-alanine olefin amino acid connected by an all-carbon crosslinker comprising one double bond
  misc_feature (5)..(12): Crosslink between residues
  MOD_RES (6)..(6): D-amino acid
  MOD_RES (7)..(7): D-Phe-4CF3
  MOD_RES (8)..(11): D-amino acid
  MOD_RES (12)..(12): Alpha-Me R5-pentenyl-alanine olefin amino acid connected by an all-carbon crosslinker comprising one double bond
  MOD_RES (13)..(13): D-amino acid
  C-term NH2
TAWYANFEALLAA

SEQ ID NO: 665 - protein, 17 aa, Artificial Sequence
  Description of Artificial Sequence: Synthetic peptide
  N-term Ac
  MOD_RES (1)..(4): D-amino acid
  MOD_RES (5)..(5): Alpha-Me S8-octenyl-alanine olefin amino acid connected by an all-carbon crosslinker comprising one double bond
  misc_feature (5)..(12): Crosslink between residues
  MOD_RES (6)..(6): D-amino acid
  MOD_RES (7)..(7): D-Phe-4CF3
  MOD_RES (8)..(11): D-amino acid
  MOD_RES (12)..(12): Alpha-Me R5-pentenyl-alanine olefin amino acid connected by an all-carbon crosslinker comprising one double bond
  MOD_RES (13)..(17): D-amino acid
  C-term NH2
TAWYANFEKLLAAAAAA

SEQ ID NO: 666 - protein, 17 aa, Artificial Sequence
  Description of Artificial Sequence: Synthetic peptide
  N-term Ac
  MOD_RES (1)..(4): D-amino acid
  MOD_RES (5)..(5): Alpha-Me S8-octenyl-alanine olefin amino acid connected by an all-carbon crosslinker comprising one double bond
  misc_feature (5)..(12): Crosslink between residues
  MOD_RES (6)..(6): D-amino acid
  MOD_RES (7)..(7): D-Phe-4CF3
  MOD_RES (8)..(11): D-amino acid
  MOD_RES (12)..(12): Alpha-Me R5-pentenyl-alanine olefin amino acid connected by an all-carbon crosslinker comprising one double bond
  MOD_RES (13)..(17): D-amino acid
  C-term NH2
TAWYANFEALLAAAAAA

SEQ ID NO: 667 - protein, 15 aa, Artificial Sequence
  Description of Artificial Sequence: Synthetic peptide
  N-term Ac
  MOD_RES (4)..(4): Alpha-Me R8-octenyl-alanine olefin amino acid connected by an all-carbon crosslinker comprising one double bond
  misc_feature (4)..(11): Crosslink between residues
  MOD_RES (6)..(6): 4-carboxy Phe
  MOD_RES (10)..(10): Cyclobutyl-Ala
  MOD_RES (11)..(11): Alpha-Me S5-pentenyl-alanine olefin amino acid connected by an all-carbon crosslinker comprising one double bond
  MOD_RES (14)..(14): Norleucine
  C-term NH2
LTFAEFWAQAASALA

SEQ ID NO: 668 - protein, 17 aa, Artificial Sequence
  Description of Artificial Sequence: Synthetic peptide
  N-term Ac
  MOD_RES (4)..(4): Alpha-Me R8-octenyl-alanine olefin amino acid connected by an all-carbon crosslinker comprising one double bond
  misc_feature (4)..(11): Crosslink between residues
  MOD_RES (11)..(11): Alpha-Me S5-pentenyl-alanine olefin amino acid connected by an all-carbon crosslinker comprising one double bond
  MOD_RES (17)..(17): D-amino acid
  C-term NH2
LTFAEYWAQLAAAAAAA

SEQ ID NO: 669 - protein, 17 aa, Artificial Sequence
  Description of Artificial Sequence: Synthetic peptide
  N-term Ac
  MOD_RES (4)..(4): Alpha-Me R8-octenyl-alanine olefin amino acid connected by an all-carbon crosslinker comprising one double bond
  misc_feature (4)..(11): Crosslink between residues
  MOD_RES (7)..(7): 6cl-Trp
  MOD_RES (11)..(11): Alpha-Me S5-pentenyl-alanine olefin amino acid connected by an all-carbon crosslinker comprising one double bond
  MOD_RES (17)..(17): D-amino acid
  C-term NH2
LTFAEYWAQLAAAAAAA

SEQ ID NO: 670 - protein, 20 aa, Artificial Sequence
  Description of Artificial Sequence: Synthetic peptide
  N-term Ac
  MOD_RES (7)..(7): Alpha-Me R8-octenyl-alanine olefin amino acid connected by an all-carbon crosslinker comprising one double bond
  misc_feature (7)..(14): Crosslink between residues
  MOD_RES (14)..(14): Alpha-Me S5-pentenyl-alanine olefin amino acid connected by an all-carbon crosslinker comprising one double bond
  MOD_RES (20)..(20): D-amino acid
  C-term NH2
AAALTFAEYWAQLAAAAAAA

SEQ ID NO: 671 - protein, 17 aa, Artificial Sequence
  Description of Artificial Sequence: Synthetic peptide
  N-term Ac
  MOD_RES (3)..(3): 3,4-difluoro Phe
  MOD_RES (4)..(4): Alpha-Me R8-octenyl-alanine olefin amino acid connected by an all-carbon crosslinker comprising one double bond
  misc_feature (4)..(11): Crosslink between residues
  MOD_RES (11)..(11): Alpha-Me S5-pentenyl-alanine olefin amino acid connected by an all-carbon crosslinker comprising one double bond
  MOD_RES (17)..(17): D-amino acid
  C-term NH2
LTFAEYWAQLAAAAAAA

SEQ ID NO: 672 - protein, 17 aa, Artificial Sequence
  Description of Artificial Sequence: Synthetic peptide
  N-term Ac
  MOD_RES (4)..(4): Alpha-Me R8-octenyl-alanine olefin amino acid connected by an all-carbon crosslinker comprising one double bond
  misc_feature (4)..(11): Crosslink between residues
  MOD_RES (11)..(11): Alpha-Me S5-pentenyl-alanine olefin amino acid connected by an all-carbon crosslinker comprising one double bond
  MOD_RES (13)..(13): 2-aminoisobutyric acid
  MOD_RES (17)..(17): D-amino acid
  C-term NH2
LTFAEYWAQLAAXAAAA

SEQ ID NO: 673 - protein, 17 aa, Artificial Sequence
  Description of Artificial Sequence: Synthetic peptide
  N-term Ac
  MOD_RES (4)..(4): Alpha-Me R8-octenyl-alanine olefin amino acid connected by an all-carbon crosslinker comprising one double bond
  misc_feature (4)..(11): Crosslink between residues
  MOD_RES (11)..(11): Alpha-Me S5-pentenyl-alanine olefin amino acid connected by an all-carbon crosslinker comprising one double bond
  MOD_RES (15)..(15): 2-aminoisobutyric acid
  MOD_RES (17)..(17): D-amino acid
  C-term NH2
LTFAEYWAQLAAAAXAA

SEQ ID NO: 674 - protein, 17 aa, Artificial Sequence
  Description of Artificial Sequence: Synthetic peptide
  N-term Ac
  MOD_RES (4)..(4): Alpha-Me R8-octenyl-alanine olefin amino acid connected by an all-carbon crosslinker comprising one double bond
  misc_feature (4)..(11): Crosslink between residues
  MOD_RES (11)..(11): Alpha-Me S5-pentenyl-alanine olefin amino acid connected by an all-carbon crosslinker comprising one double bond
  MOD_RES (16)..(16): 2-aminoisobutyric acid
  MOD_RES (17)..(17): D-amino acid
  C-term NH2
LTFAEYWAQLAAAAAXA

SEQ ID NO: 675 - protein, 17 aa, Artificial Sequence
  Description of Artificial Sequence: Synthetic peptide
  N-term Ac
  MOD_RES (4)..(4): Alpha-Me R8-octenyl-alanine olefin amino acid connected by an all-carbon crosslinker comprising one double bond
  misc_feature (4)..(11): Crosslink between residues
  MOD_RES (11)..(11): Alpha-Me S5-pentenyl-alanine olefin amino acid connected by an all-carbon crosslinker comprising one double bond
  MOD_RES (17)..(17): 2-aminoisobutyric acid
  C-term NH2
LTFAEYWAQLAAAAAAX

SEQ ID NO: 676 - protein, 17 aa, Artificial Sequence
  Description of Artificial Sequence: Synthetic peptide
  N-term Ac
  MOD_RES (4)..(4): Alpha-Me R8-octenyl-alanine olefin amino acid connected by an all-carbon crosslinker comprising one double bond
  misc_feature (4)..(11): Crosslink between residues
  MOD_RES (11)..(11): Alpha-Me S5-pentenyl-alanine olefin amino acid connected by an all-carbon crosslinker comprising one double bond
  MOD_RES (16)..(17): D-amino acid
  C-term NH2
LTFAEYWAQLAAAAAAA

SEQ ID NO: 677 - protein, 17 aa, Artificial Sequence
  Description of Artificial Sequence: Synthetic peptide
  N-term Ac
  MOD_RES (4)..(4): Alpha-Me R8-octenyl-alanine olefin amino acid connected by an all-carbon crosslinker comprising one double bond
  misc_feature (4)..(11): Crosslink between residues
  MOD_RES (11)..(11): Alpha-Me S5-pentenyl-alanine olefin amino acid connected by an all-carbon crosslinker comprising one double bond
  C-term NH2
LTFAEYWAQLAAAAAAA

SEQ ID NO: 678 - protein, 17 aa, Artificial Sequence
  Description of Artificial Sequence: Synthetic peptide
  N-term Ac
  MOD_RES (4)..(4): Alpha-Me R8-octenyl-alanine olefin amino acid connected by an all-carbon crosslinker comprising one double bond
  misc_feature (4)..(11): Crosslink between residues
  MOD_RES (11)..(11): Alpha-Me S5-pentenyl-alanine olefin amino acid connected by an all-carbon crosslinker comprising one double bond
  MOD_RES (17)..(17): Sarcosine
  C-term NH2
LTFAEYWAQLAAAAAAX

SEQ ID NO: 679 - protein, 17 aa, Artificial Sequence
  Description of Artificial Sequence: Synthetic peptide
  N-term Ac
  MOD_RES (4)..(4): Alpha-Me R8-octenyl-alanine olefin amino acid connected by an all-carbon crosslinker comprising one double bond
  misc_feature (4)..(11): Crosslink between residues
  MOD_RES (11)..(11): Alpha-Me S5-pentenyl-alanine olefin amino acid connected by an all-carbon crosslinker comprising one double bond
  MOD_RES (17)..(17): D-amino acid
  C-term OH
LTFAEYWAQLAAAAAAA

SEQ ID NO: 680 - protein, 17 aa, Artificial Sequence
  Description of Artificial Sequence: Synthetic peptide
  N-term Ac
  MOD_RES (4)..(4): Alpha-Me R6-hexynyl-alanine alkynyl amino acids, crosslinke via a dialkyne bond with a second alkynyl amino acid
  misc_feature (4)..(11): Crosslink between residues
  MOD_RES (11)..(11): Alpha-Me S5-pentynyl-alanine alkynyl amino acids, wherein the alkyne forms one half of a dialkyne bond with a second alkynyl amino acid
  MOD_RES (17)..(17): D-amino acid
  C-term NH2
LTFAAYWAQLAAAAAAA

SEQ ID NO: 681 - protein, 15 aa, Artificial Sequence
  Description of Artificial Sequence: Synthetic peptide
  N-term 5-FAM
  MOD_RES (1)..(1): Beta-Ala
  MOD_RES (5)..(5): Alpha-Me R8-octenyl-alanine olefin amino acid connected by an all-carbon crosslinker comprising one double bond
  misc_feature (5)..(12): Crosslink between residues
  MOD_RES (11)..(11): Cyclobutyl-Ala
  MOD_RES (12)..(12): Alpha-Me S5-pentenyl-alanine olefin amino acid connected by an all-carbon crosslinker comprising one double bond
  C-term NH2
ALTFAEYWAQAASAA

SEQ ID NO: 682 - protein, 17 aa, Artificial Sequence
  Description of Artificial Sequence: Synthetic peptide
  N-term Ac
  MOD_RES (4)..(4): Alpha-Me R8-octenyl-alanine olefin amino acid connected by an all-carbon crosslinker comprising one double bond
  misc_feature (4)..(11): Crosslink between residues
  MOD_RES (6)..(6): 4-carboxy Phe
  MOD_RES (10)..(10): Cyclobutyl-Ala
  MOD_RES (11)..(11): Alpha-Me S5-pentenyl-alanine olefin amino acid connected by an all-carbon crosslinker comprising one double bond
  MOD_RES (17)..(17): D-amino acid
  C-term NH2
LTFAEFWAQAAAAAAAA

SEQ ID NO: 683 - protein, 17 aa, Artificial Sequence
  Description of Artificial Sequence: Synthetic peptide
  N-term Ac
  MOD_RES (4)..(4): Alpha-Me R8-octenyl-alanine olefin amino acid connected by an all-carbon crosslinker comprising one double bond
  misc_feature (4)..(11): Crosslink between residues
  MOD_RES (10)..(10): Cyclobutyl-Ala
  MOD_RES (11)..(11): Alpha-Me S5-pentenyl-alanine olefin amino acid connected by an all-carbon crosslinker comprising one double bond
  MOD_RES (17)..(17): D-amino acid
  C-term NH2
LTFAEYWAQAAAAAAAA

SEQ ID NO: 684 - protein, 16 aa, Artificial Sequence
  Description of Artificial Sequence: Synthetic peptide
  N-term Ac
  MOD_RES (3)..(3): Alpha-Me R8-octenyl-alanine olefin amino acid connected by an all-carbon crosslinker comprising one double bond
  misc_feature (3)..(10): Crosslink between residues
  MOD_RES (10)..(10): Alpha-Me S5-pentenyl-alanine olefin amino acid connected by an all-carbon crosslinker comprising one double bond
  MOD_RES (16)..(16): D-amino acid
  C-term NH2
TFAEYWAQLAAAAAAA

SEQ ID NO: 685 - protein, 15 aa, Artificial Sequence
  Description of Artificial Sequence: Synthetic peptide
  N-term Ac
  MOD_RES (2)..(2): Alpha-Me R8-octenyl-alanine olefin amino acid connected by an all-carbon crosslinker comprising one double bond
  misc_feature (2)..(9): Crosslink between residues
  MOD_RES (9)..(9): Alpha-Me S5-pentenyl-alanine olefin amino acid connected by an all-carbon crosslinker comprising one double bond
  MOD_RES (15)..(15): D-amino acid
  C-term NH2
FAEYWAQLAAAAAAA

SEQ ID NO: 686 - protein, 17 aa, Artificial Sequence
  Description of Artificial Sequence: Synthetic peptide
  N-term Ac
  MOD_RES (4)..(4): Alpha-Me R8-octenyl-alanine olefin amino acid connected by an all-carbon crosslinker comprising one double bond
  misc_feature (4)..(11): Crosslink between residues
  MOD_RES (11)..(11): Alpha-Me S5-pentenyl-alanine olefin amino acid connected by an all-carbon crosslinker comprising one double bond
  MOD_RES (17)..(17): D-amino acid
  C-term NH2
LVFAEYWAQLAAAAAAA

SEQ ID NO: 687 - protein, 17 aa, Artificial Sequence
  Description of Artificial Sequence: Synthetic peptide
  N-term Ac
  MOD_RES (4)..(4): Alpha-Me R8-octenyl-alanine olefin amino acid connected by an all-carbon crosslinker comprising one double bond
  misc_feature (4)..(11): Crosslink between residues
  MOD_RES (11)..(11): Alpha-Me S5-pentenyl-alanine olefin amino acid connected by an all-carbon crosslinker comprising one double bond
  MOD_RES (17)..(17): D-amino acid
  C-term NH2
AAFAEYWAQLAAAAAAA

SEQ ID NO: 688 - protein, 16 aa, Artificial Sequence
  Description of Artificial Sequence: Synthetic peptide
  N-term Ac
  MOD_RES (4)..(4): Alpha-Me R8-octenyl-alanine olefin amino acid connected by an all-carbon crosslinker comprising one double bond
  misc_feature (4)..(11): Crosslink between residues
  MOD_RES (11)..(11): Alpha-Me S5-pentenyl-alanine olefin amino acid connected by an all-carbon crosslinker comprising one double bond
  MOD_RES (16)..(16): D-amino acid
  C-term NH2
LTFAEYWAQLAAAAAA

SEQ ID NO: 689 - protein, 15 aa, Artificial Sequence
  Description of Artificial Sequence: Synthetic peptide
  N-term Ac
  MOD_RES (4)..(4): Alpha-Me R8-octenyl-alanine olefin amino acid connected by an all-carbon crosslinker comprising one double bond
  misc_feature (4)..(11): Crosslink between residues
  MOD_RES (11)..(11): Alpha-Me S5-pentenyl-alanine olefin amino acid connected by an all-carbon crosslinker comprising one double bond
  MOD_RES (15)..(15): D-amino acid
  C-term NH2
LTFAEYWAQLAAAAA

SEQ ID NO: 690 - protein, 14 aa, Artificial Sequence
  Description of Artificial Sequence: Synthetic peptide
  N-term Ac
  MOD_RES (4)..(4): Alpha-Me R8-octenyl-alanine olefin amino acid connected by an all-carbon crosslinker comprising one double bond
  misc_feature (4)..(11): Crosslink between residues
  MOD_RES (11)..(11): Alpha-Me S5-pentenyl-alanine olefin amino acid connected by an all-carbon crosslinker comprising one double bond
  MOD_RES (14)..(14): D-amino acid
  C-term NH2
LTFAEYWAQLAAAA

SEQ ID NO: 691 - protein, 13 aa, Artificial Sequence
  Description of Artificial Sequence: Synthetic peptide
  N-term Ac
  MOD_RES (4)..(4): Alpha-Me R8-octenyl-alanine olefin amino acid connected by an all-carbon crosslinker comprising one double bond
  misc_feature (4)..(11): Crosslink between residues
  MOD_RES (11)..(11): Alpha-Me S5-pentenyl-alanine olefin amino acid connected by an all-carbon crosslinker comprising one double bond
  MOD_RES (13)..(13): D-amino acid
  C-term NH2
LTFAEYWAQLAAA

SEQ ID NO: 692 - protein, 12 aa, Artificial Sequence
  Description of Artificial Sequence: Synthetic peptide
  N-term Ac
  MOD_RES (4)..(4): Alpha-Me R8-octenyl-alanine olefin amino acid connected by an all-carbon crosslinker comprising one double bond
  misc_feature (4)..(11): Crosslink between residues
  MOD_RES (11)..(11): Alpha-Me S5-pentenyl-alanine olefin amino acid connected by an all-carbon crosslinker comprising one double bond
  MOD_RES (12)..(12): D-amino acid
  C-term NH2
LTFAEYWAQLAA

SEQ ID NO: 693 - protein, 16 aa, Artificial Sequence
  Description of Artificial Sequence: Synthetic peptide
  MOD_RES (2)..(2): Alpha-Me R5-pentenyl-alanine olefin amino acid connected by an all-carbon crosslinker comprising one double bond
  misc_feature (2)..(9): Crosslink between residues
  MOD_RES (9)..(9): Alpha-Me S8-octenyl-alanine olefin amino acid connected by an all-carbon crosslinker comprising one double bond
LAQETFSDAWKLLPEN

SEQ ID NO: 694 - protein, 16 aa, Artificial Sequence
  Description of Artificial Sequence: Synthetic peptide
  MOD_RES (4)..(4): Alpha-Me R5-pentenyl-alanine olefin amino acid connected by an all-carbon crosslinker comprising one double bond
  misc_feature (4)..(11): Crosslink between residues
  MOD_RES (11)..(11): Alpha-Me S8-octenyl-alanine olefin amino acid connected by an all-carbon crosslinker comprising one double bond
LSQATFSDLWALLPEN

SEQ ID NO: 695 - protein, 16 aa, Artificial Sequence
  Description of Artificial Sequence: Synthetic peptide
  MOD_RES (5)..(5): Alpha-Me R5-pentenyl-alanine olefin amino acid connected by an all-carbon crosslinker comprising one double bond
  misc_feature (5)..(12): Crosslink between residues
  MOD_RES (12)..(12): Alpha-Me S8-octenyl-alanine olefin amino acid connected by an all-carbon crosslinker comprising one double bond
LSQEAFSDLWKALPEN

SEQ ID NO: 696 - protein, 16 aa, Artificial Sequence
  Description of Artificial Sequence: Synthetic peptide
  MOD_RES (6)..(6): Alpha-Me R5-pentenyl-alanine olefin amino acid connected by an all-carbon crosslinker comprising one double bond
  misc_feature (6)..(13): Crosslink between residues
  MOD_RES (13)..(13): Alpha-Me S8-octenyl-alanine olefin amino acid connected by an all-carbon crosslinker comprising one double bond
LSQETASDLWKLAPEN

SEQ ID NO: 697 - protein, 16 aa, Artificial Sequence
  Description of Artificial Sequence: Synthetic peptide
  MOD_RES (7)..(7): Alpha-Me R5-pentenyl-alanine olefin amino acid connected by an all-carbon crosslinker comprising one double bond
  misc_feature (7)..(14): Crosslink between residues
  MOD_RES (14)..(14): Alpha-Me S8-octenyl-alanine olefin amino acid connected by an all-carbon crosslinker comprising one double bond
LSQETFADLWKLLAEN

SEQ ID NO: 698 - protein, 16 aa, Artificial Sequence
  Description of Artificial Sequence: Synthetic peptide
  MOD_RES (2)..(2): Any amino acid
  MOD_RES (8)..(8): Alpha-Me R5-pentenyl-alanine olefin amino acid connected by an all-carbon crosslinker comprising one double bond
  misc_feature (8)..(15): Crosslink between residues
  MOD_RES (15)..(15): Alpha-Me S8-octenyl-alanine olefin amino acid connected by an all-carbon crosslinker comprising one double bond
LXQETFSALWKLLPAN

SEQ ID NO: 699 - protein, 16 aa, Artificial Sequence
  Description of Artificial Sequence: Synthetic peptide
  MOD_RES (9)..(9): Alpha-Me R5-pentenyl-alanine olefin amino acid connected by an all-carbon crosslinker comprising one double bond
  misc_feature (9)..(16): Crosslink between residues
  MOD_RES (16)..(16): Alpha-Me S8-octenyl-alanine olefin amino acid connected by an all-carbon crosslinker comprising one double bond
LSQETFSDAWKLLPEA

SEQ ID NO: 700 - protein, 16 aa, Artificial Sequence
  Description of Artificial Sequence: Synthetic peptide
  MOD_RES (7)..(7): Alpha-Me R5-pentenyl-alanine olefin amino acid connected by an all-carbon crosslinker comprising one double bond
  misc_feature (7)..(14): Crosslink between residues
  MOD_RES (14)..(14): Alpha-Me S8-octenyl-alanine olefin amino acid connected by an all-carbon crosslinker comprising one double bond
LSQQTFADLWKLLAEN

SEQ ID NO: 701 - protein, 16 aa, Artificial Sequence
  Description of Artificial Sequence: Synthetic peptide
  MOD_RES (7)..(7): Alpha-Me R5-pentenyl-alanine olefin amino acid connected by an all-carbon crosslinker comprising one double bond
  misc_feature (7)..(14): Crosslink between residues
  MOD_RES (14)..(14): Alpha-Me S8-octenyl-alanine olefin amino acid connected by an all-carbon crosslinker comprising one double bond
LSQETFADLWKLLAQN

SEQ ID NO: 702 - protein, 16 aa, Artificial Sequence
  Description of Artificial Sequence: Synthetic peptide
  MOD_RES (7)..(7): Alpha-Me R5-pentenyl-alanine olefin amino acid connected by an all-carbon crosslinker comprising one double bond
  misc_feature (7)..(14): Crosslink between residues
  MOD_RES (14)..(14): Alpha-Me S8-octenyl-alanine olefin amino acid connected by an all-carbon crosslinker comprising one double bond
LSQQTFADLWKLLAQN

SEQ ID NO: 703 - protein, 16 aa, Artificial Sequence
  Description of Artificial Sequence: Synthetic peptide
  MOD_RES (7)..(7): Alpha-Me R5-pentenyl-alanine olefin amino acid connected by an all-carbon crosslinker comprising one double bond
  misc_feature (7)..(14): Crosslink between residues
  MOD_RES (14)..(14): Alpha-Me S8-octenyl-alanine olefin amino acid connected by an all-carbon crosslinker comprising one double bond
LSQETFANLWKLLAQN

SEQ ID NO: 704 - protein, 16 aa, Artificial Sequence
  Description of Artificial Sequence: Synthetic peptide
  MOD_RES (7)..(7): Alpha-Me R5-pentenyl-alanine olefin amino acid connected by an all-carbon crosslinker comprising one double bond
  misc_feature (7)..(14): Crosslink between residues
  MOD_RES (14)..(14): Alpha-Me S8-octenyl-alanine olefin amino acid connected by an all-carbon crosslinker comprising one double bond
LSQQTFANLWKLLAQN

SEQ ID NO: 705 - protein, 16 aa, Artificial Sequence
  Description of Artificial Sequence: Synthetic peptide
  MOD_RES (7)..(7): Alpha-Me R5-pentenyl-alanine olefin amino acid connected by an all-carbon crosslinker comprising one double bond
  misc_feature (7)..(14): Crosslink between residues
  MOD_RES (14)..(14): Alpha-Me S8-octenyl-alanine olefin amino acid connected by an all-carbon crosslinker comprising one double bond
LSQQTFANLWRLLAQN

SEQ ID NO: 706 - protein, 16 aa, Artificial Sequence
  Description of Artificial Sequence: Synthetic peptide
  MOD_RES (7)..(7): Alpha-Me R5-pentenyl-alanine olefin amino acid connected by an all-carbon crosslinker comprising one double bond
  misc_feature (7)..(14): Crosslink between residues
  MOD_RES (14)..(14): Alpha-Me S8-octenyl-alanine olefin amino acid connected by an all-carbon crosslinker comprising one double bond
QSQQTFANLWKLLAQN

SEQ ID NO: 707 - protein, 16 aa, Artificial Sequence
  Description of Artificial Sequence: Synthetic peptide
  MOD_RES (7)..(7): Alpha-Me R5-pentenyl-alanine olefin amino acid connected by an all-carbon crosslinker comprising one double bond
  misc_feature (7)..(14): Crosslink between residues
  MOD_RES (14)..(14): Alpha-Me S8-octenyl-alanine olefin amino acid connected by an all-carbon crosslinker comprising one double bond
QSQQTFANLWRLLAQN

SEQ ID NO: 708 - protein, 16 aa, Artificial Sequence
  Description of Artificial Sequence: Synthetic peptide
  MOD_RES (7)..(7): Alpha-Me R5-pentenyl-alanine olefin amino acid connected by an all-carbon crosslinker comprising one double bond
  misc_feature (7)..(14): Crosslink between residues
  MOD_RES (14)..(14): Alpha-Me S8-octenyl-alanine olefin amino acid connected by an all-carbon crosslinker comprising one double bond
QSQQTAANLWRLLAQN

SEQ ID NO: 709 - protein, 16 aa, Artificial Sequence
  Description of Artificial Sequence: Synthetic peptide
  MOD_RES (2)..(2): Alpha-Me R8-octenyl-alanine olefin amino acid connected by an all-carbon crosslinker comprising one double bond
  misc_feature (2)..(9): Crosslink between residues
  MOD_RES (9)..(9): Alpha-Me S5-pentenyl-alanine olefin amino acid connected by an all-carbon crosslinker comprising one double bond
LAQETFSDAWKLLPEN

SEQ ID NO: 710 - protein, 16 aa, Artificial Sequence
  Description of Artificial Sequence: Synthetic peptide
  MOD_RES (4)..(4): Alpha-Me R8-octenyl-alanine olefin amino acid connected by an all-carbon crosslinker comprising one double bond
  misc_feature (4)..(11): Crosslink between residues
  MOD_RES (11)..(11): Alpha-Me S5-pentenyl-alanine olefin amino acid connected by an all-carbon crosslinker comprising one double bond
LSQATFSDLWALLPEN

SEQ ID NO: 711 - protein, 16 aa, Artificial Sequence
  Description of Artificial Sequence: Synthetic peptide
  MOD_RES (5)..(5): Alpha-Me R8-octenyl-alanine olefin amino acid connected by an all-carbon crosslinker comprising one double bond
  misc_feature (5)..(12): Crosslink between residues
  MOD_RES (12)..(12): Alpha-Me S5-pentenyl-alanine olefin amino acid connected by an all-carbon crosslinker comprising one double bond
LSQEAFSDLWKALPEN

SEQ ID NO: 712 - protein, 16 aa, Artificial Sequence
  Description of Artificial Sequence: Synthetic peptide
  MOD_RES (6)..(6): Alpha-Me R8-octenyl-alanine olefin amino acid connected by an all-carbon crosslinker comprising one double bond
  misc_feature (6)..(13): Crosslink between residues
  MOD_RES (13)..(13): Alpha-Me S5-pentenyl-alanine olefin amino acid connected by an all-carbon crosslinker comprising one double bond
LSQETASDLWKLAPEN

SEQ ID NO: 713 - protein, 16 aa, Artificial Sequence
  Description of Artificial Sequence: Synthetic peptide
  MOD_RES (7)..(7): Alpha-Me R8-octenyl-alanine olefin amino acid connected by an all-carbon crosslinker comprising one double bond
  misc_feature (7)..(14): Crosslink between residues
  MOD_RES (14)..(14): Alpha-Me S5-pentenyl-alanine olefin amino acid connected by an all-carbon crosslinker comprising one double bond
LSQETFADLWKLLAEN

SEQ ID NO: 714 - protein, 16 aa, Artificial Sequence
  Description of Artificial Sequence: Synthetic peptide
  MOD_RES (2)..(2): Any amino acid
  MOD_RES (8)..(8): Alpha-Me R8-octenyl-alanine olefin amino acid connected by an all-carbon crosslinker comprising one double bond
  misc_feature (8)..(15): Crosslink between residues
  MOD_RES (15)..(15): Alpha-Me S5-pentenyl-alanine olefin amino acid connected by an all-carbon crosslinker comprising one double bond
LXQETFSALWKLLPAN

SEQ ID NO: 715 - protein, 16 aa, Artificial Sequence
  Description of Artificial Sequence: Synthetic peptide
  MOD_RES (9)..(9): Alpha-Me R8-octenyl-alanine olefin amino acid connected by an all-carbon crosslinker comprising one double bond
  misc_feature (9)..(16): Crosslink between residues
  MOD_RES (16)..(16): Alpha-Me S5-pentenyl-alanine olefin amino acid connected by an all-carbon crosslinker comprising one double bond
LSQETFSDAWKLLPEA

SEQ ID NO: 716 - protein, 16 aa, Artificial Sequence
  Description of Artificial Sequence: Synthetic peptide
  MOD_RES (7)..(7): Alpha-Me R8-octenyl-alanine olefin amino acid connected by an all-carbon crosslinker comprising one double bond
  misc_feature (7)..(14): Crosslink between residues
  MOD_RES (14)..(14): Alpha-Me S5-pentenyl-alanine olefin amino acid connected by an all-carbon crosslinker comprising one double bond
LSQQTFADLWKLLAEN

SEQ ID NO: 717 - protein, 16 aa, Artificial Sequence
  Description of Artificial Sequence: Synthetic peptide
  MOD_RES (7)..(7): Alpha-Me R8-octenyl-alanine olefin amino acid connected by an all-carbon crosslinker comprising one double bond
  misc_feature (7)..(14): Crosslink between residues
  MOD_RES (14)..(14): Alpha-Me S5-pentenyl-alanine olefin amino acid connected by an all-carbon crosslinker comprising one double bond
LSQETFADLWKLLAQN

SEQ ID NO: 718 - protein, 16 aa, Artificial Sequence
  Description of Artificial Sequence: Synthetic peptide
  MOD_RES (7)..(7): Alpha-Me R8-octenyl-alanine olefin amino acid connected by an all-carbon crosslinker comprising one double bond
  misc_feature (7)..(14): Crosslink between residues
  MOD_RES (14)..(14): Alpha-Me S5-pentenyl-alanine olefin amino acid connected by an all-carbon crosslinker comprising one double bond
LSQQTFADLWKLLAQN

SEQ ID NO: 719 - protein, 16 aa, Artificial Sequence
  Description of Artificial Sequence: Synthetic peptide
  MOD_RES (7)..(7): Alpha-Me R8-octenyl-alanine olefin amino acid connected by an all-carbon crosslinker comprising one double bond
  misc_feature (7)..(14): Crosslink between residues
  MOD_RES (14)..(14): Alpha-Me S5-pentenyl-alanine olefin amino acid connected by an all-carbon crosslinker comprising one double bond
LSQETFANLWKLLAQN

SEQ ID NO: 720 - protein, 16 aa, Artificial Sequence
  Description of Artificial Sequence: Synthetic peptide
  MOD_RES (7)..(7): Alpha-Me R8-octenyl-alanine olefin amino acid connected by an all-carbon crosslinker comprising one double bond
  misc_feature (7)..(14): Crosslink between residues
  MOD_RES (14)..(14): Alpha-Me S5-pentenyl-alanine olefin amino acid connected by an all-carbon crosslinker comprising one double bond
LSQQTFANLWKLLAQN

SEQ ID NO: 721 - protein, 16 aa, Artificial Sequence
  Description of Artificial Sequence: Synthetic peptide
  MOD_RES (7)..(7): Alpha-Me R8-octenyl-alanine olefin amino acid connected by an all-carbon crosslinker comprising one double bond
  misc_feature (7)..(14): Crosslink between residues
  MOD_RES (14)..(14): Alpha-Me S5-pentenyl-alanine olefin amino acid connected by an all-carbon crosslinker comprising one double bond
LSQQTFANLWRLLAQN

SEQ ID NO: 722 - protein, 16 aa, Artificial Sequence
  Description of Artificial Sequence: Synthetic peptide
  MOD_RES (7)..(7): Alpha-Me R8-octenyl-alanine olefin amino acid connected by an all-carbon crosslinker comprising one double bond
  misc_feature (7)..(14): Crosslink between residues
  MOD_RES (14)..(14): Alpha-Me S5-pentenyl-alanine olefin amino acid connected by an all-carbon crosslinker comprising one double bond
QSQQTFANLWKLLAQN

SEQ ID NO: 723 - protein, 16 aa, Artificial Sequence
  Description of Artificial Sequence: Synthetic peptide
  MOD_RES (7)..(7): Alpha-Me R8-octenyl-alanine olefin amino acid connected by an all-carbon crosslinker comprising one double bond
  misc_feature (7)..(14): Crosslink between residues
  MOD_RES (14)..(14): Alpha-Me S5-pentenyl-alanine olefin amino acid connected by an all-carbon crosslinker comprising one double bond
QSQQTFANLWRLLAQN

SEQ ID NO: 724 - protein, 16 aa, Artificial Sequence
  Description of Artificial Sequence: Synthetic peptide
  MOD_RES (7)..(7): Alpha-Me R8-octenyl-alanine olefin amino acid connected by an all-carbon crosslinker comprising one double bond
  misc_feature (7)..(14): Crosslink between residues
  MOD_RES (14)..(14): Alpha-Me S5-pentenyl-alanine olefin amino acid connected by an all-carbon crosslinker comprising one double bond
QSQQTAANLWRLLAQN

SEQ ID NO: 725 - protein, 16 aa, Artificial Sequence
  Description of Artificial Sequence: Synthetic peptide
  MOD_RES (7)..(7): Alpha-Me R8-octenyl-alanine olefin amino acid connected by an all-carbon crosslinker comprising one double bond
  misc_feature (7)..(14): Crosslink between residues
  MOD_RES (14)..(14): Alpha-Me S5-pentenyl-alanine olefin amino acid connected by an all-carbon crosslinker comprising one double bond
QSQQTFANLWRKKAQN

SEQ ID NO: 726 - protein, 14 aa, Artificial Sequence
  Description of Artificial Sequence: Synthetic peptide
  MOD_RES (5)..(5): Alpha-Me R8-octenyl-alanine olefin amino acid connected by an all-carbon crosslinker comprising one double bond
  misc_feature (5)..(12): Crosslink between residues
  MOD_RES (12)..(12): Alpha-Me S5-pentenyl-alanine olefin amino acid connected by an all-carbon crosslinker comprising one double bond
QQTFADLWRLLAEN

SEQ ID NO: 727 - protein, 12 aa, Artificial Sequence
  Description of Artificial Sequence: Synthetic peptide
  MOD_RES (5)..(5): Alpha-Me R8-octenyl-alanine olefin amino acid connected by an all-carbon crosslinker comprising one double bond
  misc_feature (5)..(12): Crosslink between residues
  MOD_RES (12)..(12): Alpha-Me S5-pentenyl-alanine olefin amino acid connected by an all-carbon crosslinker comprising one double bond
QQTFADLWRLLA

SEQ ID NO: 728 - protein, 13 aa, Artificial Sequence
  Description of Artificial Sequence: Synthetic peptide
  MOD_RES (7)..(7): Alpha-Me S5-pentenyl-alanine olefin amino acid connected by an all-carbon crosslinker comprising one double bond
  misc_feature (7)..(11): Crosslink between residues
  MOD_RES (11)..(11): Alpha-Me S5-pentenyl-alanine olefin amino acid connected by an all-carbon crosslinker comprising one double bond
LSQQTFADLWALL

SEQ ID NO: 729 - protein, 11 aa, Artificial Sequence
  Description of Artificial Sequence: Synthetic peptide
  MOD_RES (5)..(5): Alpha-Me S5-pentenyl-alanine olefin amino acid connected by an all-carbon crosslinker comprising one double bond
  misc_feature (5)..(9): Crosslink between residues
  MOD_RES (9)..(9): Alpha-Me S5-pentenyl-alanine olefin amino acid connected by an all-carbon crosslinker comprising one double bond
QQTFADLWALL

SEQ ID NO: 730 - protein, 14 aa, Artificial Sequence
  Description of Artificial Sequence: Synthetic peptide
  MOD_RES (5)..(5): Alpha-Me R8-octenyl-alanine olefin amino acid connected by an all-carbon crosslinker comprising one double bond
  misc_feature (5)..(12): Crosslink between residues
  MOD_RES (12)..(12): Alpha-Me S5-pentenyl-alanine olefin amino acid connected by an all-carbon crosslinker comprising one double bond
QQTAADLWRLLAEN

SEQ ID NO: 731 - protein, 16 aa, Artificial Sequence
  Description of Artificial Sequence: Synthetic peptide
  MOD_RES (7)..(7): Alpha-Me R5-pentenyl-alanine olefin amino acid connected by an all-carbon crosslinker comprising one double bond
  misc_feature (7)..(14): Crosslink between residues
  MOD_RES (14)..(14): Alpha-Me S8-octenyl-alanine olefin amino acid connected by an all-carbon crosslinker comprising one double bond
QSQQTFANLWRLLAQN

SEQ ID NO: 732 - protein, 16 aa, Artificial Sequence
  Description of Artificial Sequence: Synthetic peptide
  MOD_RES (7)..(7): Alpha-Me R5-pentenyl-alanine olefin amino acid connected by an all-carbon crosslinker comprising one double bond
  misc_feature (7)..(14): Crosslink between residues
  MOD_RES (14)..(14): Alpha-Me S8-octenyl-alanine olefin amino acid connected by an all-carbon crosslinker comprising one double bond
QSQQTAANLWRLLAQN

SEQ ID NO: 733 - protein, 16 aa, Artificial Sequence
  Description of Artificial Sequence: Synthetic peptide
  MOD_RES (7)..(7): Alpha-Me R8-octenyl-alanine olefin amino acid connected by an all-carbon crosslinker comprising one double bond
  misc_feature (7)..(14): Crosslink between residues
  MOD_RES (14)..(14): Alpha-Me S5-pentenyl-alanine olefin amino acid connected by an all-carbon crosslinker comprising one double bond
QSQQTFADLWRLLAQN

SEQ ID NO: 734 - protein, 11 aa, Artificial Sequence
  Description of Artificial Sequence: Synthetic peptide
  MOD_RES (4)..(4): Alpha-Me R8-octenyl-alanine olefin amino acid connected by an all-carbon crosslinker comprising one double bond
  misc_feature (4)..(11): Crosslink between residues
  MOD_RES (11)..(11): Alpha-Me S5-pentenyl-alanine olefin amino acid connected by an all-carbon crosslinker comprising one double bond
QTFANLWRLLA

SEQ ID NO: 735 - protein, 16 aa, Artificial Sequence
  Description of Artificial Sequence: Synthetic peptide
  MOD_RES (7)..(7): Alpha-Me S5-pentenyl-alanine olefin amino acid connected by an all-carbon crosslinker comprising one double bond
  misc_feature (7)..(11): Crosslink between residues
  MOD_RES (11)..(11): Alpha-Me S5-pentenyl-alanine olefin amino acid connected by an all-carbon crosslinker comprising one double bond
QSQQTFANLWALLPQN

SEQ ID NO: 736 - protein, 16 aa, Artificial Sequence
  Description of Artificial Sequence: Synthetic peptide
  MOD_RES (3)..(3): Alpha-Me S5-pentenyl-alanine olefin amino acid connected by an all-carbon crosslinker comprising one double bond
  misc_feature (3)..(7): Crosslink between residues
  MOD_RES (7)..(7): Alpha-Me S5-pentenyl-alanine olefin amino acid connected by an all-carbon crosslinker comprising one double bond
QSAQTFANLWRLLPQN

SEQ ID NO: 737 - protein, 10 aa, Artificial Sequence
  Description of Artificial Sequence: Synthetic peptide
  MOD_RES (1)..(1): Alpha-Me S5-pentenyl-alanine olefin amino acid connected by an all-carbon crosslinker comprising one double bond
  misc_feature (1)..(5): Crosslink between residues
  MOD_RES (5)..(5): Alpha-Me S5-pentenyl-alanine olefin amino acid connected by an all-carbon crosslinker comprising one double bond
ATFSALWKLL

SEQ ID NO: 738 - protein, 10 aa, Artificial Sequence
  Description of Artificial Sequence: Synthetic peptide
  MOD_RES (4)..(4): Alpha-Me S5-pentenyl-alanine olefin amino acid connected by an all-carbon crosslinker comprising one double bond
  misc_feature (4)..(8): Crosslink between residues
  MOD_RES (8)..(8): Alpha-Me S5-pentenyl-alanine olefin amino acid connected by an all-carbon crosslinker comprising one double bond
ETFADLWALL

SEQ ID NO: 739 - protein, 10 aa, Artificial Sequence
  Description of Artificial Sequence: Synthetic peptide
  MOD_RES (4)..(4): Alpha-Me S5-pentenyl-alanine olefin amino acid connected by an all-carbon crosslinker comprising one double bond
  misc_feature (4)..(8): Crosslink between residues
  MOD_RES (8)..(8): Alpha-Me S5-pentenyl-alanine olefin amino acid connected by an all-carbon crosslinker comprising one double bond
QTFANLWALL

SEQ ID NO: 740 - protein, 13 aa, Artificial Sequence
  Description of Artificial Sequence: Synthetic peptide
  MOD_RES (1)..(1): Alpha-Me S5-pentenyl-alanine olefin amino acid connected by an all-carbon crosslinker comprising one double bond
  misc_feature (1)..(5): Crosslink between residues
  MOD_RES (5)..(5): Alpha-Me S5-pentenyl-alanine olefin amino acid connected by an all-carbon crosslinker comprising one double bond
ASQEAFSNLWKLL

SEQ ID NO: 741 - protein, 16 aa, Artificial Sequence
  Description of Artificial Sequence: Synthetic peptide
  N-term Ac
  MOD_RES (7)..(7): Alpha-Me R8-octenyl-alanine olefin amino acid connected by an all-carbon crosslinker comprising one double bond
  misc_feature (7)..(14): Crosslink between residues
  MOD_RES (14)..(14): Alpha-Me S5-pentenyl-alanine olefin amino acid connected by an all-carbon crosslinker comprising one double bond
  C-term NH2
LSQETFADLWKLLAEN

SEQ ID NO: 742 - protein, 16 aa, Artificial Sequence
  Description of Artificial Sequence: Synthetic peptide
  N-term Ac
  MOD_RES (7)..(7): Alpha-Me R8-octenyl-alanine olefin amino acid connected by an all-carbon crosslinker comprising one double bond
  misc_feature (7)..(14): Crosslink between residues
  MOD_RES (14)..(14): Alpha-Me S5-pentenyl-alanine olefin amino acid connected by an all-carbon crosslinker comprising one double bond
  C-term NH2
LSQETFANLWKLLAQN

SEQ ID NO: 743 - protein, 16 aa, Artificial Sequence
  Description of Artificial Sequence: Synthetic peptide
  N-term Ac
  MOD_RES (7)..(7): Alpha-Me R8-octenyl-alanine olefin amino acid connected by an all-carbon crosslinker comprising one double bond
  misc_feature (7)..(14): Crosslink between residues
  MOD_RES (14)..(14): Alpha-Me S5-pentenyl-alanine olefin amino acid connected by an all-carbon crosslinker comprising one double bond
  C-term NH2
LSQQTFANLWRLLAQN

SEQ ID NO: 744 - protein, 16 aa, Artificial Sequence
  Description of Artificial Sequence: Synthetic peptide
  N-term Ac
  MOD_RES (7)..(7): Alpha-Me R8-octenyl-alanine olefin amino acid connected by an all-carbon crosslinker comprising one double bond
  misc_feature (7)..(14): Crosslink between residues
  MOD_RES (14)..(14): Alpha-Me S5-pentenyl-alanine olefin amino acid connected by an all-carbon crosslinker comprising one double bond
  C-term NH2
QSQQTFANLWKLLAQN

SEQ ID NO: 745 - protein, 16 aa, Artificial Sequence
  Description of Artificial Sequence: Synthetic peptide
  N-term Ac
  MOD_RES (7)..(7): Alpha-Me R8-octenyl-alanine olefin amino acid connected by an all-carbon crosslinker comprising one double bond
  misc_feature (7)..(14): Crosslink between residues
  MOD_RES (14)..(14): Alpha-Me S5-pentenyl-alanine olefin amino acid connected by an all-carbon crosslinker comprising one double bond
  C-term NH2
QSQQTFANLWRLLAQN

SEQ ID NO: 746 - protein, 16 aa, Artificial Sequence
  Description of Artificial Sequence: Synthetic peptide
  N-term Ac
  MOD_RES (7)..(7): Alpha-Me R8-octenyl-alanine olefin amino acid connected by an all-carbon crosslinker comprising one double bond
  misc_feature (7)..(14): Crosslink between residues
  MOD_RES (14)..(14): Alpha-Me S5-pentenyl-alanine olefin amino acid connected by an all-carbon crosslinker comprising one double bond
  C-term NH2
QSQQTAANLWRLLAQN

SEQ ID NO: 747 - protein, 16 aa, Artificial Sequence
  Description of Artificial Sequence: Synthetic peptide
  N-term Ac
  MOD_RES (2)..(2): 2-aminoisobutyric acid
  MOD_RES (7)..(7): Alpha-Me R8-octenyl-alanine olefin amino acid connected by an all-carbon crosslinker comprising one double bond
  misc_feature (7)..(14): Crosslink between residues
  MOD_RES (14)..(14): Alpha-Me S5-pentenyl-alanine olefin amino acid connected by an all-carbon crosslinker comprising one double bond
  C-term NH2
QXQQTFANLWRLLAQN

SEQ ID NO: 748 - protein, 16 aa, Artificial Sequence
  Description of Artificial Sequence: Synthetic peptide
  N-term Ac
  C-term NH2
QSQQTFSNLWRLLPQN

SEQ ID NO: 749 - protein, 16 aa, Artificial Sequence
  Description of Artificial Sequence: Synthetic peptide
  N-term Ac
  MOD_RES (7)..(7): Alpha-Me R8-octenyl-alanine olefin amino acid that is not connected by a crosslinker
  MOD_RES (14)..(14): Alpha-Me S5-pentenyl-alanine olefin amino acid that is not connected by a crosslinker
  C-term NH2
QSQQTFANLWRLLAQN

SEQ ID NO: 750 - protein, 16 aa, Artificial Sequence
  Description of Artificial Sequence: Synthetic peptide
  N-term Ac
  MOD_RES (4)..(4): 2-aminoisobutyric acid
  MOD_RES (7)..(7): Alpha-Me R8-octenyl-alanine olefin amino acid connected by an all-carbon crosslinker comprising one double bond
  misc_feature (7)..(14): Crosslink between residues
  MOD_RES (14)..(14): Alpha-Me S5-pentenyl-alanine olefin amino acid connected by an all-carbon crosslinker comprising one double bond
  C-term NH2
QSQXTFANLWRLLAQN

SEQ ID NO: 751 - protein, 16 aa, Artificial Sequence
  Description of Artificial Sequence: Synthetic peptide
  N-term Ac
  MOD_RES (7)..(7): Alpha-Me R8-octenyl-alanine olefin amino acid connected by an all-carbon crosslinker comprising one double bond
  misc_feature (7)..(14): Crosslink between residues
  MOD_RES (14)..(14): Alpha-Me S5-pentenyl-alanine olefin amino acid connected by an all-carbon crosslinker comprising one double bond
  C-term NH2
QSQQTFANLWRLLAAN

SEQ ID NO: 752 - protein, 16 aa, Artificial Sequence
  Description of Artificial Sequence: Synthetic peptide
  N-term Ac
  MOD_RES (7)..(7): Alpha-Me R8-octenyl-alanine olefin amino acid connected by an all-carbon crosslinker comprising one double bond
  misc_feature (7)..(14): Crosslink between residues
  MOD_RES (14)..(14): Alpha-Me S5-pentenyl-alanine olefin amino acid connected by an all-carbon crosslinker comprising one double bond
  C-term NH2
ASQQTFANLWRLLAQN

SEQ ID NO: 753 - protein, 16 aa, Artificial Sequence
  Description of Artificial Sequence: Synthetic peptide
  N-term Ac
  MOD_RES (7)..(7): Alpha-Me R8-octenyl-alanine olefin amino acid connected by an all-carbon crosslinker comprising one double bond
  misc_feature (7)..(14): Crosslink between residues
  MOD_RES (14)..(14): Alpha-Me S5-pentenyl-alanine olefin amino acid connected by an all-carbon crosslinker comprising one double bond
  C-term NH2
QSQQTFAALWRLLAQN

SEQ ID NO: 754 - protein, 16 aa, Artificial Sequence
  Description of Artificial Sequence: Synthetic peptide
  N-term Ac
  MOD_RES (7)..(7): Alpha-Me R8-octenyl-alanine olefin amino acid connected by an all-carbon crosslinker comprising one double bond
  misc_feature (7)..(14): Crosslink between residues
  MOD_RES (14)..(14): Alpha-Me S5-pentenyl-alanine olefin amino acid connected by an all-carbon crosslinker comprising one double bond
  C-term NH2
QSQETFANLWRLLAQN

SEQ ID NO: 755 - protein, 16 aa, Artificial Sequence
  Description of Artificial Sequence: Synthetic peptide
  N-term Ac
  MOD_RES (7)..(7): Alpha-Me R8-octenyl-alanine olefin amino acid connected by an all-carbon crosslinker comprising one double bond
  misc_feature (7)..(14): Crosslink between residues
  MOD_RES (14)..(14): Alpha-Me S5-pentenyl-alanine olefin amino acid connected by an all-carbon crosslinker comprising one double bond
  C-term NH2
RSQQTFANLWRLLAQN

SEQ ID NO: 756 - protein, 16 aa, Artificial Sequence
  Description of Artificial Sequence: Synthetic peptide
  N-term Ac
  MOD_RES (7)..(7): Alpha-Me R8-octenyl-alanine olefin amino acid connected by an all-carbon crosslinker comprising one double bond
  misc_feature (7)..(14): Crosslink between residues
  MOD_RES (14)..(14): Alpha-Me S5-pentenyl-alanine olefin amino acid connected by an all-carbon crosslinker comprising one double bond
  C-term NH2
RSQQTFANLWRLLAEN

SEQ ID NO: 757 - protein, 16 aa, Artificial Sequence
  Description of Artificial Sequence: Synthetic peptide
  N-term Ac
  C-term NH2
LSQETFSDLWKLLPEN

SEQ ID NO: 758 - protein, 16 aa, Artificial Sequence
  Description of Artificial Sequence: Synthetic peptide
  N-term Ac
  MOD_RES (4)..(4): Alpha-Me S5-pentenyl-alanine olefin amino acid connected by an all-carbon crosslinker comprising one double bond
  misc_feature (4)..(8): Crosslink between residues
  MOD_RES (8)..(8): Alpha-Me S5-pentenyl-alanine olefin amino acid connected by an all-carbon crosslinker comprising one double bond
  C-term NH2
QSQATFSALWRLLPQN

SEQ ID NO: 759 - protein, 16 aa, Artificial Sequence
  Description of Artificial Sequence: Synthetic peptide
  N-term Ac
  MOD_RES (5)..(5): Alpha-Me S5-pentenyl-alanine olefin amino acid connected by an all-carbon crosslinker comprising one double bond
  misc_feature (5)..(9): Crosslink between residues
  MOD_RES (9)..(9): Alpha-Me S5-pentenyl-alanine olefin amino acid connected by an all-carbon crosslinker comprising one double bond
  C-term NH2
QSQQAFSNAWRLLPQN

SEQ ID NO: 760 - protein, 16 aa, Artificial Sequence
  Description of Artificial Sequence: Synthetic peptide
  N-term Ac
  MOD_RES (6)..(6): Alpha-Me S5-pentenyl-alanine olefin amino acid connected by an all-carbon crosslinker comprising one double bond
  misc_feature (6)..(10): Crosslink between residues
  MOD_RES (10)..(10): Alpha-Me S5-pentenyl-alanine olefin amino acid connected by an all-carbon crosslinker comprising one double bond
  C-term NH2
QSQQTASNLARLLPQN

SEQ ID NO: 761 - protein, 16 aa, Artificial Sequence
  Description of Artificial Sequence: Synthetic peptide
  N-term Ac
  MOD_RES (7)..(7): Alpha-Me S5-pentenyl-alanine olefin amino acid connected by an all-carbon crosslinker comprising one double bond
  misc_feature (7)..(11): Crosslink between residues
  MOD_RES (11)..(11): Alpha-Me S5-pentenyl-alanine olefin amino acid connected by an all-carbon crosslinker comprising one double bond
  C-term NH2
QSQQTFANLWALLPQN

SEQ ID NO: 762 - protein, 19 aa, Artificial Sequence
  Description of Artificial Sequence: Synthetic peptide
  N-term Ac
  MOD_RES (7)..(7): Alpha-Me R8-octenyl-alanine olefin amino acid connected by an all-carbon crosslinker comprising one double bond
  misc_feature (7)..(14): Crosslink between residues
  MOD_RES (11)..(11): 2-aminoisobutyric acid
  MOD_RES (13)..(13): Norleucine
  MOD_RES (14)..(14): Alpha-Me S5-pentenyl-alanine olefin amino acid connected by an all-carbon crosslinker comprising one double bond
  MOD_RES (17)..(17): 2-aminoisobutyric acid
  C-term NH2
RTQATFANQWXALATNXTR

SEQ ID NO: 763 - protein, 16 aa, Artificial Sequence
  Description of Artificial Sequence: Synthetic peptide
  N-term Ac
  MOD_RES (7)..(7): Alpha-Me R8-octenyl-alanine olefin amino acid connected by an all-carbon crosslinker comprising one double bond
  misc_feature (7)..(14): Crosslink between residues
  MOD_RES (14)..(14): Alpha-Me S5-pentenyl-alanine olefin amino acid connected by an all-carbon crosslinker comprising one double bond
  C-term NH2
QSQQTFANLWRLLARN

SEQ ID NO: 764 - protein, 16 aa, Artificial Sequence
  Description of Artificial Sequence: Synthetic peptide
  N-term Ac
  MOD_RES (7)..(7): Alpha-Me R8-octenyl-alanine olefin amino acid connected by an all-carbon crosslinker comprising one double bond
  misc_feature (7)..(14): Crosslink between residues
  MOD_RES (14)..(14): Alpha-Me S5-pentenyl-alanine olefin amino acid connected by an all-carbon crosslinker comprising one double bond
  C-term NH2
QSQRTFANLWRLLAQN

SEQ ID NO: 765 - protein, 16 aa, Artificial Sequence
  Description of Artificial Sequence: Synthetic peptide
  N-term Ac
  MOD_RES (7)..(7): Alpha-Me R8-octenyl-alanine olefin amino acid connected by an all-carbon crosslinker comprising one double bond
  misc_feature (7)..(14): Crosslink between residues
  MOD_RES (9)..(9): Norleucine
  MOD_RES (14)..(14): Alpha-Me S5-pentenyl-alanine olefin amino acid connected by an all-carbon crosslinker comprising one double bond
  C-term NH2
QSQQTFANLWRLLAQN

SEQ ID NO: 766 - protein, 16 aa, Artificial Sequence
  Description of Artificial Sequence: Synthetic peptide
  N-term Ac
  MOD_RES (7)..(7): Alpha-Me R8-octenyl-alanine olefin amino acid connected by an all-carbon crosslinker comprising one double bond
  misc_feature (7)..(14): Crosslink between residues
  MOD_RES (12)..(12): Norleucine
  MOD_RES (14)..(14): Alpha-Me S5-pentenyl-alanine olefin amino acid connected by an all-carbon crosslinker comprising one double bond
  C-term NH2
QSQQTFANLWRLLAQN

SEQ ID NO: 767 - protein, 16 aa, Artificial Sequence
  Description of Artificial Sequence: Synthetic peptide
  N-term Ac
  MOD_RES (7)..(7): Alpha-Me R8-octenyl-alanine olefin amino acid connected by an all-carbon crosslinker comprising one double bond
  misc_feature (7)..(14): Crosslink between residues
  MOD_RES (13)..(13): Norleucine
  MOD_RES (14)..(14): Alpha-Me S5-pentenyl-alanine olefin amino acid connected by an all-carbon crosslinker comprising one double bond
  C-term NH2
QSQQTFANLWRLLAQN

SEQ ID NO: 768 - protein, 16 aa, Artificial Sequence
  Description of Artificial Sequence: Synthetic peptide
  N-term Ac
  MOD_RES (7)..(7): Alpha-Me R8-octenyl-alanine olefin amino acid connected by an all-carbon crosslinker comprising one double bond
  misc_feature (7)..(14): Crosslink between residues
  MOD_RES (14)..(14): Alpha-Me S5-pentenyl-alanine olefin amino acid connected by an all-carbon crosslinker comprising one double bond
  C-term NH2
QSQQTYANLWRLLAQN

SEQ ID NO: 769 - protein, 16 aa, Artificial Sequence
  Description of Artificial Sequence: Synthetic peptide
  N-term Ac
  MOD_RES (2)..(2): 2-aminoisobutyric acid
  MOD_RES (7)..(7): Alpha-Me R8-octenyl-alanine olefin amino acid connected by an all-carbon crosslinker comprising one double bond
  misc_feature (7)..(14): Crosslink between residues
  MOD_RES (14)..(14): Alpha-Me S5-pentenyl-alanine olefin amino acid connected by an all-carbon crosslinker comprising one double bond
  C-term NH2
RXQQTFANLWRLLAQN

SEQ ID NO: 770 - protein, 12 aa, Artificial Sequence
  Description of Artificial Sequence: Synthetic peptide
  N-term Ac
  C-term NH2
MPRFMDYWEGLN

SEQ ID NO: 771 - protein, 16 aa, Artificial Sequence
  Description of Artificial Sequence: Synthetic peptide
  N-term Ac
  MOD_RES (7)..(7): Alpha-Me R8-octenyl-alanine olefin amino acid connected by an all-carbon crosslinker comprising one double bond
  misc_feature (7)..(14): Crosslink between residues
  MOD_RES (14)..(14): Alpha-Me S5-pentenyl-alanine olefin amino acid connected by an all-carbon crosslinker comprising one double bond
  C-term NH2
RSQQRFANLWRLLAQN

SEQ ID NO: 772 - protein, 16 aa, Artificial Sequence
  Description of Artificial Sequence: Synthetic peptide
  N-term Ac
  MOD_RES (7)..(7): Alpha-Me R8-octenyl-alanine olefin amino acid connected by an all-carbon crosslinker comprising one double bond
  misc_feature (7)..(14): Crosslink between residues
  MOD_RES (14)..(14): Alpha-Me S5-pentenyl-alanine olefin amino acid connected by an all-carbon crosslinker comprising one double bond
  C-term NH2
QSQQRFANLWRLLAQN

SEQ ID NO: 773 - protein, 16 aa, Artificial Sequence
  Description of Artificial Sequence: Synthetic peptide
  N-term Ac
  MOD_RES (2)..(2): 2-aminoisobutyric acid
  MOD_RES (7)..(7): Alpha-Me R8-octenyl-alanine olefin amino acid connected by an all-carbon crosslinker comprising one double bond
  misc_feature (7)..(14): Crosslink between residues
  MOD_RES (14)..(14): Alpha-Me S5-pentenyl-alanine olefin amino acid connected by an all-carbon crosslinker comprising one double bond
  C-term NH2
RXQQRFANLWRLLAQN

SEQ ID NO: 774 - protein, 16 aa, Artificial Sequence
  Description of Artificial Sequence: Synthetic peptide
  N-term Ac
  MOD_RES (7)..(7): Alpha-Me R8-octenyl-alanine olefin amino acid connected by an all-carbon crosslinker comprising one double bond
  misc_feature (7)..(14): Crosslink between residues
  MOD_RES (14)..(14): Alpha-Me S5-pentenyl-alanine olefin amino acid connected by an all-carbon crosslinker comprising one double bond
  C-term NH2
RSQQRFANFWRLLAQN

SEQ ID NO: 775 - protein, 16 aa, Artificial Sequence
  Description of Artificial Sequence: Synthetic peptide
  N-term Ac
  MOD_RES (7)..(7): Alpha-Me R8-octenyl-alanine olefin amino acid connected by an all-carbon crosslinker comprising one double bond
  misc_feature (7)..(14): Crosslink between residues
  MOD_RES (14)..(14): Alpha-Me S5-pentenyl-alanine olefin amino acid connected by an all-carbon crosslinker comprising one double bond
  C-term NH2
RSQQRFANYWRLLAQN

SEQ ID NO: 776 - protein, 16 aa, Artificial Sequence
  Description of Artificial Sequence: Synthetic peptide
  N-term Ac
  MOD_RES (7)..(7): Alpha-Me R8-octenyl-alanine olefin amino acid connected by an all-carbon crosslinker comprising one double bond
  misc_feature (7)..(14): Crosslink between residues
  MOD_RES (14)..(14): Alpha-Me S5-pentenyl-alanine olefin amino acid connected by an all-carbon crosslinker comprising one double bond
  C-term NH2
RSQQTFANLWQLLAQN

SEQ ID NO: 777 - protein, 16 aa, Artificial Sequence
  Description of Artificial Sequence: Synthetic peptide
  N-term Ac
  MOD_RES (7)..(7): Alpha-Me R8-octenyl-alanine olefin amino acid connected by an all-carbon crosslinker comprising one double bond
  misc_feature (7)..(14): Crosslink between residues
  MOD_RES (12)..(12): Alpha-Me-Leu
  MOD_RES (14)..(14): Alpha-Me S5-pentenyl-alanine olefin amino acid connected by an all-carbon crosslinker comprising one double bond
  C-term NH2
QSQQTFANLWQLLAQN

SEQ ID NO: 778 - protein, 16 aa, Artificial Sequence
  Description of Artificial Sequence: Synthetic peptide
  N-term Ac
  MOD_RES (7)..(7): Alpha-Me R8-octenyl-alanine olefin amino acid connected by an all-carbon crosslinker comprising one double bond
  misc_feature (7)..(14): Crosslink between residues
  MOD_RES (9)..(9): Alpha-Me-Leu
  MOD_RES (14)..(14): Alpha-Me S5-pentenyl-alanine olefin amino acid connected by an all-carbon crosslinker comprising one double bond
  C-term NH2
QSQQTFANLWRLLAQN

SEQ ID NO: 779 - protein, 14 aa, Artificial Sequence
  Description of Artificial Sequence: Synthetic peptide
  N-term Ac
  MOD_RES (1)..(1): Norleucine
  MOD_RES (5)..(5): Alpha-Me R8-octenyl-alanine olefin amino acid connected by an all-carbon crosslinker comprising one double bond
  misc_feature (5)..(12): Crosslink between residues
  MOD_RES (12)..(12): Alpha-Me S5-pentenyl-alanine olefin amino acid connected by an all-carbon crosslinker comprising one double bond
  C-term NH2
LPRFADYWEGLAQN

SEQ ID NO: 780 - protein, 14 aa, Artificial Sequence
  Description of Artificial Sequence: Synthetic peptide
  N-term Ac
  MOD_RES (1)..(1): Norleucine
  MOD_RES (5)..(5): Alpha-Me R8-octenyl-alanine olefin amino acid connected by an all-carbon crosslinker comprising one double bond
  misc_feature (5)..(12): Crosslink between residues
  MOD_RES (12)..(12): Alpha-Me S5-pentenyl-alanine olefin amino acid connected by an all-carbon crosslinker comprising one double bond
  C-term NH2
LPRFANYWRLLAQN

SEQ ID NO: 781 - protein, 11 aa, Artificial Sequence
  Description of Artificial Sequence: Synthetic peptide
  N-term Ac
  MOD_RES (3)..(3): Alpha-Me R8-octenyl-alanine olefin amino acid connected by an all-carbon crosslinker comprising one double bond
  misc_feature (3)..(10): Crosslink between residues
  MOD_RES (10)..(10): Alpha-Me S5-pentenyl-alanine olefin amino acid connected by an all-carbon crosslinker comprising one double bond
  C-term NH2
RFANLWRLLAQ

SEQ ID NO: 782 - protein, 16 aa, Artificial Sequence
  Description of Artificial Sequence: Synthetic peptide
  N-term Ac
  MOD_RES (7)..(7): Alpha-Me R8-octenyl-alanine olefin amino acid connected by an all-carbon crosslinker comprising one double bond
  misc_feature (7)..(14): Crosslink between residues
  MOD_RES (9)..(9): 2-fluoro-Phe
  MOD_RES (14)..(14): Alpha-Me S5-pentenyl-alanine olefin amino acid connected by an all-carbon crosslinker comprising one double bond
  C-term NH2
QSQQTFANFWRLLAQN

SEQ ID NO: 783 - protein, 16 aa, Artificial Sequence
  Description of Artificial Sequence: Synthetic peptide
  N-term Ac
  MOD_RES (7)..(7): Alpha-Me R8-octenyl-alanine olefin amino acid connected by an all-carbon crosslinker comprising one double bond
  misc_feature (7)..(14): Crosslink between residues
  MOD_RES (9)..(9): 3-fluoro-Phe
  MOD_RES (14)..(14): Alpha-Me S5-pentenyl-alanine olefin amino acid connected by an all-carbon crosslinker comprising one double bond
  C-term NH2
QSQQTFANFWRLLAQN

SEQ ID NO: 784 - protein, 16 aa, Artificial Sequence
  Description of Artificial Sequence: Synthetic peptide
  N-term Ac
  MOD_RES (7)..(7): Alpha-hydrogen R8-octenyl-alanine olefin amino acid connected by an all-carbon saturated crosslinker with no double bond
  misc_feature (7)..(14): Crosslink between residues
  MOD_RES (14)..(14): Alpha-hydrogen S5-pentenyl-alanine olefin amino acid connected by an all-carbon saturated crosslinker with no double bond
  C-term NH2
QSQQTFANLWRLLAQN

SEQ ID NO: 785 - protein, 16 aa, Artificial Sequence
  Description of Artificial Sequence: Synthetic peptide
  N-term Ac
  MOD_RES (7)..(7): Alpha-Me R8-octenyl-alanine olefin amino acid connected by an all-carbon crosslinker comprising one double bond
  misc_feature (7)..(14): Crosslink between residues
  MOD_RES (14)..(14): Alpha-Me S5-pentenyl-alanine olefin amino acid connected by an all-carbon crosslinker comprising one double bond
  C-term NH2
RSQQTAANLWRLLAQN

SEQ ID NO: 786 - protein, 16 aa, Artificial Sequence
  Description of Artificial Sequence: Synthetic peptide
  N-term Ac
  MOD_RES (7)..(7): Alpha-Me R8-octenyl-alanine olefin amino acid connected by an all-carbon crosslinker comprising no double bonds
  misc_feature (7)..(14): Crosslink between residues
  MOD_RES (14)..(14): Alpha-Me S5-pentenyl-alanine olefin amino acid connected by an all-carbon crosslinker comprising no double bonds
  C-term NH2
QSQQTFANLWRLLAQN

SEQ ID NO: 787 - protein, 16 aa, Artificial Sequence
  Description of Artificial Sequence: Synthetic peptide
  N-term acetylated with heptanoic acid and connected to internal olefin amino acid by an all-carbon crosslinker to position 4 comprising one double bond
  MOD_RES (4)..(4): Alpha-Me S5-pentenyl-alanine olefin amino acid connected by an all-carbon crosslinker to the N-term comprising one double bond
  C-term NH2
QSQATFSNLWRLLPQN

SEQ ID NO: 788 - protein, 16 aa, Artificial Sequence
  Description of Artificial Sequence: Synthetic peptide
  N-term acetylated with heptanoic acid and connected to internal olefin amino acid by an all-carbon crosslinker to position 4 comprising one double bond
  MOD_RES (4)..(4): Alpha-Me S5-pentenyl-alanine olefin amino acid connected by an all-carbon crosslinker to the N-term comprising one double bond
  MOD_RES (7)..(7): Alpha-Me R8-octenyl-alanine olefin amino acid connected by an all-carbon crosslinker comprising one double bond
  misc_feature (7)..(14): Crosslink between residues
  MOD_RES (14)..(14): Alpha-Me S5-pentenyl-alanine olefin amino acid connected by an all-carbon crosslinker comprising one double bond
  C-term NH2
QSQATFANLWRLLAQN

SEQ ID NO: 789 - protein, 16 aa, Artificial Sequence
  Description of Artificial Sequence: Synthetic peptide
  N-term Ac
  MOD_RES (7)..(7): Alpha-Me R8-octenyl-alanine olefin amino acid connected by an all-carbon crosslinker comprising one double bond
  misc_feature (7)..(14): Crosslink between residues
  MOD_RES (10)..(10): 6cl-Trp
  MOD_RES (14)..(14): Alpha-Me S5-pentenyl-alanine olefin amino acid connected by an all-carbon crosslinker comprising one double bond
  C-term NH2
QSQQTFANLWRLLAQN

SEQ ID NO: 790 - protein, 16 aa, Artificial Sequence
  Description of Artificial Sequence: Synthetic peptide
  N-term Ac
  MOD_RES (7)..(7): Alpha-Me R8-octenyl-alanine olefin amino acid connected by an all-carbon crosslinker comprising one double bond
  misc_feature (7)..(14): Crosslink between residues
  MOD_RES (10)..(10): Me6cl-Trp
  MOD_RES (14)..(14): Alpha-Me S5-pentenyl-alanine olefin amino acid connected by an all-carbon crosslinker comprising one double bond
  C-term NH2
QSQQTFANLWRLLAQN

SEQ ID NO: 791 - protein, 12 aa, Artificial Sequence
  Description of Artificial Sequence: Synthetic peptide
  N-term Ac
  C-term NH2
LTFEHYWAQLTS

SEQ ID NO: 792 - protein, 12 aa, Artificial Sequence
  Description of Artificial Sequence: Synthetic peptide
  N-term Ac
  MOD_RES (4)..(4): Alpha-Me S5-pentenyl-alanine olefin amino acid connected by an all-carbon crosslinker comprising one double bond
  misc_feature (4)..(8): Crosslink between residues
  MOD_RES (8)..(8): Alpha-Me S5-pentenyl-alanine olefin amino acid connected by an all-carbon crosslinker comprising one double bond
  C-term NH2
LTFAHYWAQLTS

SEQ ID NO: 793 - protein, 12 aa, Artificial Sequence
  Description of Artificial Sequence: Synthetic peptide
  N-term Ac
  MOD_RES (5)..(5): Alpha-Me S5-pentenyl-alanine olefin amino acid connected by an all-carbon crosslinker comprising one double bond
  misc_feature (5)..(9): Crosslink between residues
  MOD_RES (9)..(9): Alpha-Me S5-pentenyl-alanine olefin amino acid connected by an all-carbon crosslinker comprising one double bond
  C-term NH2
LTFEAYWAALTS

SEQ ID NO: 794 - protein, 12 aa, Artificial Sequence
  Description of Artificial Sequence: Synthetic peptide
  N-term Ac
  MOD_RES (4)..(4): Alpha-Me R8-octenyl-alanine olefin amino acid connected by an all-carbon crosslinker comprising one Z configured double bond
  misc_feature (4)..(11): Crosslink between residues
  MOD_RES (11)..(11): Alpha-Me S5-pentenyl-alanine olefin amino acid connected by an all-carbon crosslinker comprising one Z configured double bond
  C-term NH2
LTFAHYWAQLAS

SEQ ID NO: 795 - protein, 12 aa, Artificial Sequence
  Description of Artificial Sequence: Synthetic peptide
  N-term Ac
  MOD_RES (4)..(4): Alpha-Me R8-octenyl-alanine olefin amino acid connected by an all-carbon crosslinker comprising one double bond
  misc_feature (4)..(11): Crosslink between residues
  MOD_RES (11)..(11): Alpha-Me S5-pentenyl-alanine olefin amino acid connected by an all-carbon crosslinker comprising one double bond
  C-term NH2
LTFAHYWRQLAS

SEQ ID NO: 796 - protein, 16 aa, Artificial Sequence
  Description of Artificial Sequence: Synthetic peptide
  N-term Ac
  MOD_RES (3)..(3): Alpha-Me S5-pentenyl-alanine olefin amino acid connected by an all-carbon crosslinker comprising one double bond
  misc_feature (3)..(7): Crosslink between residues
  MOD_RES (7)..(7): Two pentenyl-alanine olefin side chains, each of which is crosslinked to another amino acid as indicated
  misc_feature (7)..(14): Crosslink between residues
  MOD_RES (14)..(14): Alpha-Me S8-octenyl-alanine olefin amino acid connected by an all-carbon crosslinker comprising one double bond
  C-term NH2
QSAQTFANLWRLLAQN

SEQ ID NO: 797 - protein, 16 aa, Artificial Sequence
  Description of Artificial Sequence: Synthetic peptide
  N-term Ac
  C-term NH2
QSQQTASNLWRLLPQN

SEQ ID NO: 798 - protein, 16 aa, Artificial Sequence
  Description of Artificial Sequence: Synthetic peptide
  N-term Ac
  MOD_RES (7)..(7): Alpha-Me R8-octenyl-alanine olefin amino acid that is not connected by a crosslinker
  MOD_RES (14)..(14): Alpha-Me S5-pentenyl-alanine olefin amino acid that is not connected by a crosslinker
  C-term NH2
QSQQTAANLWRLLAQN

SEQ ID NO: 799 - protein, 16 aa, Artificial Sequence
  Description of Artificial Sequence: Synthetic peptide
  N-term Ac
  MOD_RES (7)..(7): Alpha-Me R8-octenyl-alanine olefin amino acid that is not connected by a crosslinker
  MOD_RES (14)..(14): Alpha-Me S5-pentenyl-alanine olefin amino acid that is not connected by a crosslinker
  C-term NH2
ASQQTFANLWRLLAQN

SEQ ID NO: 800 - protein, 16 aa, Artificial Sequence
  Description of Artificial Sequence: Synthetic peptide
  N-term Ac
  MOD_RES (1)..(1): Alpha-Me S5-pentenyl-alanine olefin amino acid connected by an all-carbon crosslinker comprising one double bond
  misc_feature (1)..(5): Crosslink between residues
  MOD_RES (5)..(5): Alpha-Me S5-pentenyl-alanine olefin amino acid connected by an all-carbon crosslinker comprising one double bond
  MOD_RES (14)..(14): 2-aminoisobutyric acid
  C-term NH2
ASQQAFSNLWRLLXQN

SEQ ID NO: 801 - protein, 16 aa, Artificial Sequence
  Description of Artificial Sequence: Synthetic peptide
  N-term Ac
  MOD_RES (3)..(3): Alpha-Me S5-pentenyl-alanine olefin amino acid connected by an all-carbon crosslinker comprising one double bond
  misc_feature (3)..(7): Crosslink between residues
  MOD_RES (7)..(7): Alpha-Me S5-pentenyl-alanine olefin amino acid connected by an all-carbon crosslinker comprising one double bond
  MOD_RES (14)..(14): 2-aminoisobutyric acid
  C-term NH2
QSAQTFANLWRLLXQN

SEQ ID NO: 802 - protein, 16 aa, Artificial Sequence
  Description of Artificial Sequence: Synthetic peptide
  N-term Ac
  MOD_RES (5)..(5): Alpha-Me S5-pentenyl-alanine olefin amino acid connected by an all-carbon crosslinker comprising one double bond
  misc_feature (5)..(9): Crosslink between residues
  MOD_RES (9)..(9): Alpha-Me S5-pentenyl-alanine olefin amino acid connected by an all-carbon crosslinker comprising one double bond
  MOD_RES (14)..(14): 2-aminoisobutyric acid
  C-term NH2
QSQQAFSNAWRLLXQN

SEQ ID NO: 803 - protein, 16 aa, Artificial Sequence
  Description of Artificial Sequence: Synthetic peptide
  N-term Ac
  MOD_RES (7)..(7): Alpha-Me S5-pentenyl-alanine olefin amino acid connected by an all-carbon crosslinker comprising one double bond
  misc_feature (7)..(11): Crosslink between residues
  MOD_RES (11)..(11): Alpha-Me S5-pentenyl-alanine olefin amino acid connected by an all-carbon crosslinker comprising one double bond
  MOD_RES (14)..(14): 2-aminoisobutyric acid
  C-term NH2
QSQQTFANLWALLXQN

SEQ ID NO: 804 - protein, 16 aa, Artificial Sequence
  Description of Artificial Sequence: Synthetic peptide
  N-term Ac
  MOD_RES (8)..(8): Alpha-Me S5-pentenyl-alanine olefin amino acid connected by an all-carbon crosslinker comprising one double bond
  misc_feature (8)..(12): Crosslink between residues
  MOD_RES (12)..(12): Alpha-Me S5-pentenyl-alanine olefin amino acid connected by an all-carbon crosslinker comprising one double bond
  MOD_RES (14)..(14): 2-aminoisobutyric acid
  C-term NH2
QSQQTFSALWRALXQN

SEQ ID NO: 805 - protein, 16 aa, Artificial Sequence
  Description of Artificial Sequence: Synthetic peptide
  N-term Ac
  MOD_RES (11)..(11): Alpha-Me S5-pentenyl-alanine olefin amino acid connected by an all-carbon crosslinker comprising one double bond
  misc_feature (11)..(15): Crosslink between residues
  MOD_RES (15)..(15): Alpha-Me S5-pentenyl-alanine olefin amino acid connected by an all-carbon crosslinker comprising one double bond
  C-term NH2
QSQQTFSNLWALLAAN

SEQ ID NO: 806 - protein, 16 aa, Artificial Sequence
  Description of Artificial Sequence: Synthetic peptide
  N-term Ac
  MOD_RES (1)..(1): Alpha-Me S5-pentenyl-alanine olefin amino acid that is not connected by a crosslinker
  MOD_RES (5)..(5): Alpha-Me S5-pentenyl-alanine olefin amino acid that is not connected by a crosslinker
  MOD_RES (14)..(14): 2-aminoisobutyric acid
  C-term NH2
ASQQAFSNLWRLLXQN

SEQ ID NO: 807 - protein, 16 aa, Artificial Sequence
  Description of Artificial Sequence: Synthetic peptide
  N-term Ac
  MOD_RES (3)..(3): Alpha-Me S5-pentenyl-alanine olefin amino acid that is not connected by a crosslinker
  MOD_RES (7)..(7): Alpha-Me S5-pentenyl-alanine olefin amino acid that is not connected by a crosslinker
  MOD_RES (14)..(14): 2-aminoisobutyric acid
  C-term NH2
QSAQTFANLWRLLXQN

SEQ ID NO: 808 - protein, 16 aa, Artificial Sequence
  Description of Artificial Sequence: Synthetic peptide
  N-term Ac
  MOD_RES (5)..(5): Alpha-Me S5-pentenyl-alanine olefin amino acid that is not connected by a crosslinker
  MOD_RES (9)..(9): Alpha-Me S5-pentenyl-alanine olefin amino acid that is not connected by a crosslinker
  MOD_RES (14)..(14): 2-aminoisobutyric acid
  C-term NH2
QSQQAFSNAWRLLXQN

SEQ ID NO: 809 - protein, 16 aa, Artificial Sequence
  Description of Artificial Sequence: Synthetic peptide
  N-term Ac
  MOD_RES (7)..(7): Alpha-Me S5-pentenyl-alanine olefin amino acid that is not connected by a crosslinker
  MOD_RES (11)..(11): Alpha-Me S5-pentenyl-alanine olefin amino acid that is not connected by a crosslinker
  MOD_RES (14)..(14): 2-aminoisobutyric acid
  C-term NH2
QSQQTFANLWALLXQN

SEQ ID NO: 810 - protein, 16 aa, Artificial Sequence
  Description of Artificial Sequence: Synthetic peptide
  N-term Ac
  MOD_RES (4)..(4): Alpha-Me S5-pentenyl-alanine olefin amino acid connected by an all-carbon crosslinker comprising one double bond
  misc_feature (4)..(8): Crosslink between residues
  MOD_RES (8)..(8): Alpha-Me S5-pentenyl-alanine olefin amino acid connected by an all-carbon crosslinker comprising one double bond
  MOD_RES (14)..(14): 2-aminoisobutyric acid
  C-term NH2
QSQATFSALWRLLXQN

SEQ ID NO: 811 - protein, 16 aa, Artificial Sequence
  Description of Artificial Sequence: Synthetic peptide
  N-term Ac
  MOD_RES (4)..(4): Alpha-Me S5-pentenyl-alanine olefin amino acid that is not connected by a crosslinker
  MOD_RES (8)..(8): Alpha-Me S5-pentenyl-alanine olefin amino acid that is not connected by a crosslinker
  MOD_RES (14)..(14): 2-aminoisobutyric acid
  C-term NH2
QSQATFSALWRLLXQN

SEQ ID NO: 812 - protein, 16 aa, Artificial Sequence
  Description of Artificial Sequence: Synthetic peptide
  N-term Ac
  MOD_RES (3)..(3): Alpha-Me S5-pentenyl-alanine olefin amino acid not connected by any crosslinker
  MOD_RES (7)..(7): Amino acid comprising two pentenyl-alanine olefin side chains that are not crosslinked
  MOD_RES (14)..(14): Alpha-Me S8-octenyl-alanine olefin amino acid not connected by any crosslinker
  C-term NH2
QSAQTFANLWRLLAQN

SEQ ID NO: 813 - protein, 16 aa, Artificial Sequence
  Description of Artificial Sequence: Synthetic peptide
  N-term Ac
  MOD_RES (1)..(1): Alpha-Me R8-octenyl-alanine olefin amino acid connected by an all-carbon crosslinker comprising one double bond
  misc_feature (1)..(8): Crosslink between residues
  MOD_RES (8)..(8): Alpha-Me S5-pentenyl-alanine olefin amino acid connected by an all-carbon crosslinker comprising one double bond
  MOD_RES (14)..(14): 2-aminoisobutyric acid
  C-term NH2
ASQQTFSALWRLLXQN

SEQ ID NO: 814 - protein, 16 aa, Artificial Sequence
  Description of Artificial Sequence: Synthetic peptide
  N-term Ac
  MOD_RES (4)..(4): Alpha-Me R8-octenyl-alanine olefin amino acid connected by an all-carbon crosslinker comprising one double bond
  misc_feature (4)..(11): Crosslink between residues
  MOD_RES (11)..(11): Alpha-Me S5-pentenyl-alanine olefin amino acid connected by an all-carbon crosslinker comprising one double bond
  MOD_RES (14)..(14): 2-aminoisobutyric acid
  C-term NH2
QSQATFSNLWALLXQN

SEQ ID NO: 815 - protein, 16 aa, Artificial Sequence
  Description of Artificial Sequence: Synthetic peptide
  N-term Ac
  MOD_RES (8)..(8): Alpha-Me R8-octenyl-alanine olefin amino acid connected by an all-carbon crosslinker comprising one double bond
  misc_feature (8)..(15): Crosslink between residues
  MOD_RES (15)..(15): Alpha-Me S5-pentenyl-alanine olefin amino acid connected by an all-carbon crosslinker comprising one double bond
  C-term NH2
QSQQTFSALWRLLAAN

SEQ ID NO: 816 - protein, 16 aa, Artificial Sequence
  Description of Artificial Sequence: Synthetic peptide
  N-term Ac
  MOD_RES (3)..(3): Alpha-Me R5-pentenyl-alanine olefin amino acid connected by an all-carbon crosslinker comprising one double bond
  misc_feature (3)..(7): Crosslink between residues
  MOD_RES (7)..(7): Two pentenyl-alanine olefin side chains, each of which is crosslinked to another amino acid as indicated
  misc_feature (7)..(11): Crosslink between residues
  MOD_RES (11)..(11): Alpha-Me S5-pentenyl-alanine olefin amino acid connected by an all-carbon crosslinker comprising one double bond
  MOD_RES (14)..(14): 2-aminoisobutyric acid
  C-term NH2
QSAQTFANLWALLXQN

SEQ ID NO: 817 - protein, 16 aa, Artificial Sequence
  Description of Artificial Sequence: Synthetic peptide
  N-term Ac
  MOD_RES (1)..(1): Alpha-Me R8-octenyl-alanine olefin amino acid that is not connected by a crosslinker
  MOD_RES (8)..(8): Alpha-Me S5-pentenyl-alanine olefin amino acid that is not connected by a crosslinker
  MOD_RES (14)..(14): 2-aminoisobutyric acid
  C-term NH2
ASQQTFSALWRLLXQN

SEQ ID NO: 818 - protein, 16 aa, Artificial Sequence
  Description of Artificial Sequence: Synthetic peptide
  N-term Ac
  MOD_RES (4)..(4): Alpha-Me R8-octenyl-alanine olefin amino acid that is not connected by a crosslinker
  MOD_RES (11)..(11): Alpha-Me S5-pentenyl-alanine olefin amino acid that is not connected by a crosslinker
  MOD_RES (14)..(14): 2-aminoisobutyric acid
  C-term NH2
QSQATFSNLWALLXQN

SEQ ID NO: 819 - protein, 16 aa, Artificial Sequence
  Description of Artificial Sequence: Synthetic peptide
  N-term Ac
  MOD_RES (8)..(8): Alpha-Me R8-octenyl-alanine olefin amino acid that is not connected by a crosslinker
  MOD_RES (15)..(15): Alpha-Me S5-pentenyl-alanine olefin amino acid that is not connected by a crosslinker
  C-term NH2
QSQQTFSALWRLLAAN

SEQ ID NO: 820 - protein, 16 aa, Artificial Sequence
  Description of Artificial Sequence: Synthetic peptide
  N-term Ac
  MOD_RES (3)..(3): Alpha-Me R5-pentenyl-alanine olefin amino acid that is not connected by a crosslinker
  MOD_RES (7)..(7): Amino acid comprising two pentenyl-alanine olefin side chains that are not crosslinked
  MOD_RES (11)..(11): Alpha-Me S5-pentenyl-alanine olefin amino acid that is not connected by a crosslinker
  MOD_RES (14)..(14): 2-aminoisobutyric acid
  C-term NH2
QSAQTFANLWALLXQN

SEQ ID NO: 821 - protein, 16 aa, Artificial Sequence
  Description of Artificial Sequence: Synthetic peptide
  N-term Ac
  MOD_RES (14)..(14): 2-aminoisobutyric acid
  C-term NH2
QSQQTFSNLWRLLXQN

SEQ ID NO: 822 - protein, 16 aa, Artificial Sequence
  Description of Artificial Sequence: Synthetic peptide
  N-term acetylated with heptanoic acid
  MOD_RES (4)..(4): Alpha-Me S5-pentenyl-alanine olefin amino acid that is not connected by a crosslinker
  MOD_RES (7)..(7): Alpha-Me R8-octenyl-alanine olefin amino acid that is not connected by a crosslinker
  MOD_RES (14)..(14): Alpha-Me S5-pentenyl-alanine olefin amino acid that is not connected by a crosslinker
  C-term NH2
QSQATFANLWRLLAQN

SEQ ID NO: 823 - protein, 16 aa, Artificial Sequence
  Description of Artificial Sequence: Synthetic peptide
  N-term Ac
  MOD_RES (7)..(7): Alpha-Me R8-octenyl-alanine olefin amino acid connected by an all-carbon crosslinker comprising one double bond
  misc_feature (7)..(14): Crosslink between residues
  MOD_RES (14)..(14): Alpha-Me S5-pentenyl-alanine olefin amino acid connected by an all-carbon crosslinker comprising one double bond
  C-term NH2
ASQQTFANLRWLLAQN

SEQ ID NO: 824 - protein, 15 aa, Artificial Sequence
  Description of Artificial Sequence: Synthetic peptide
  N-term Ac
  MOD_RES (7)..(7): Alpha-Me R8-octenyl-alanine olefin amino acid that is not connected by a crosslinker
  MOD_RES (14)..(14): Alpha-Me S5-pentenyl-alanine olefin amino acid that is not connected by a crosslinker
  C-term NH2
QSQQTFANLWRLLAQ

SEQ ID NO: 825 - protein, 15 aa, Artificial Sequence
  Description of Artificial Sequence: Synthetic peptide
  N-term Ac
  MOD_RES (7)..(7): Alpha-Me R8-octenyl-alanine olefin amino acid connected by an all-carbon crosslinker comprising one double bond
  misc_feature (7)..(14): Crosslink between residues
  MOD_RES (14)..(14): Alpha-Me S5-pentenyl-alanine olefin amino acid connected by an all-carbon crosslinker comprising one double bond
  C-term NH2
QSQQTFANLWRLLAQ

SEQ ID NO: 826 - protein, 16 aa, Artificial Sequence
  Description of Artificial Sequence: Synthetic peptide
  N-term Ac
  MOD_RES (7)..(7): Alpha-Me R8-octenyl-alanine olefin amino acid connected by an all-carbon crosslinker comprising one double bond
  misc_feature (7)..(14): Crosslink between residues
  MOD_RES (14)..(14): Alpha-Me S5-pentenyl-alanine olefin amino acid connected by an all-carbon crosslinker comprising one double bond
  C-term NH2
AAARAAAAAARAAAAA

SEQ ID NO: 827 - protein, 13 aa, Artificial Sequence
  Description of Artificial Sequence: Synthetic peptide
  N-term Ac
  C-term NH2
LTFEHYWAQLTSA

SEQ ID NO: 828 - protein, 13 aa, Artificial Sequence
  Description of Artificial Sequence: Synthetic peptide
  N-term Ac
  MOD_RES (4)..(4): Alpha-Me R8-octenyl-alanine olefin amino acid connected by an all-carbon crosslinker comprising one double bond
  misc_feature (4)..(11): Crosslink between residues
  MOD_RES (11)..(11): Alpha-Me S5-pentenyl-alanine olefin amino acid connected by an all-carbon crosslinker comprising one double bond
  C-term NH2
LTFAHYWAQLASA

SEQ ID NO: 829 - protein, 16 aa, Artificial Sequence
  Description of Artificial Sequence: Synthetic peptide
  N-term Ac
  C-term NH2
ASQQTFSNLWRLLPQN

SEQ ID NO: 830 - protein, 16 aa, Artificial Sequence
  Description of Artificial Sequence: Synthetic peptide
  N-term Ac
  MOD_RES (3)..(3): Alpha-Me S5-pentenyl-alanine olefin amino acid connected by an all-carbon crosslinker comprising one double bond
  misc_feature (3)..(7): Crosslink between residues
  MOD_RES (7)..(7): Two pentenyl-alanine olefin side chains, each of which is crosslinked to another amino acid as indicated
  misc_feature (7)..(11): Crosslink between residues
  MOD_RES (11)..(11): Alpha-Me R5-pentenyl-alanine olefin amino acid connected by an all-carbon crosslinker comprising one double bond
  MOD_RES (14)..(14): 2-aminoisobutyric acid
  C-term NH2
QSAQTFANLWALLXQN

SEQ ID NO: 831 - protein, 16 aa, Artificial Sequence
  Description of Artificial Sequence: Synthetic peptide
  N-term Ac
  MOD_RES (7)..(7): 2-aminoisobutyric acid
  MOD_RES (14)..(14): 2-aminoisobutyric acid
  C-term NH2
QSQQTFXNLWRLLXQN

SEQ ID NO: 832 - protein, 16 aa, Artificial Sequence
  Description of Artificial Sequence: Synthetic peptide
  N-term Ac
  MOD_RES (7)..(7): Norleucine
  MOD_RES (14)..(14): Norleucine
  C-term NH2
QSQQTFLNLWRLLLQN

SEQ ID NO: 833 - protein, 16 aa, Artificial Sequence
  Description of Artificial Sequence: Synthetic peptide
  N-term Ac
  MOD_RES (7)..(7): Alpha-Me R8-octenyl-alanine olefin amino acid that is not connected by a crosslinker
  MOD_RES (14)..(14): 2-aminoisobutyric acid
  C-term NH2
QSQQTFANLWRLLXQN

SEQ ID NO: 834 - protein, 16 aa, Artificial Sequence
  Description of Artificial Sequence: Synthetic peptide
  N-term Ac
  MOD_RES (7)..(7): Alpha-Me R8-octenyl-alanine olefin amino acid that is not connected by a crosslinker
  MOD_RES (14)..(14): Norleucine
  C-term NH2
QSQQTFANLWRLLLQN

SEQ ID NO: 835 - protein, 16 aa, Artificial Sequence
  Description of Artificial Sequence: Synthetic peptide
  N-term Ac
  MOD_RES (7)..(7): 2-aminoisobutyric acid
  MOD_RES (14)..(14): Alpha-Me S5-pentenyl-alanine olefin amino acid that is not connected by a crosslinker
  C-term NH2
QSQQTFXNLWRLLAQN

SEQ ID NO: 836 - protein, 16 aa, Artificial Sequence
  Description of Artificial Sequence: Synthetic peptide
  N-term Ac
  MOD_RES (7)..(7): Norleucine
  MOD_RES (14)..(14): Alpha-Me S5-pentenyl-alanine olefin amino acid that is not connected by a crosslinker
  C-term NH2
QSQQTFLNLWRLLAQN

SEQ ID NO: 837 - protein, 16 aa, Artificial Sequence
  Description of Artificial Sequence: Synthetic peptide
  N-term Ac
  MOD_RES (7)..(7): Alpha-Me R8-octenyl-alanine olefin amino acid connected by an all-carbon crosslinker comprising no double bonds
  misc_feature (7)..(14): Crosslink between residues
  MOD_RES (10)..(10): 6cl-Trp
  MOD_RES (12)..(12): Norleucine
  MOD_RES (14)..(14): Alpha-Me S5-pentenyl-alanine olefin amino acid connected by an all-carbon crosslinker comprising no double bonds
  C-term NH2
QSQQTFANLWRLLAQN

SEQ ID NO: 838 - protein, 16 aa, Artificial Sequence
  Description of Artificial Sequence: Synthetic peptide
  N-term Ac
  MOD_RES (7)..(7): Alpha-Me R8-octenyl-alanine olefin amino acid connected by an all-carbon crosslinker comprising no double bonds
  misc_feature (7)..(3): Crosslink between residues
  MOD_RES (10)..(10): Me6clW
  MOD_RES (14)..(14): Alpha-Me S5-pentenyl-alanine olefin amino acid connected by an all-carbon crosslinker comprising no double bonds
  C-term NH2
QSQQTFANLWRLLAQN

SEQ ID NO: 839 - protein, 8 aa, Artificial Sequence
  Description of Artificial Sequence: Synthetic peptide
  N-term Ac
  MOD_RES (2)..(2): Norleucine
  MOD_RES (3)..(3): Alpha-Me S5-pentenyl-alanine olefin amino acid connected by an all-carbon crosslinker comprising one double bond
  misc_feature (3)..(7): Crosslink between residues
  MOD_RES (7)..(7): Alpha-Me S5-pentenyl-alanine olefin amino acid connected by an all-carbon crosslinker comprising one double bond
  C-term NH2
FLAYWEAL

SEQ ID NO: 840 - protein, 10 aa, Artificial Sequence
  Description of Artificial Sequence: Synthetic peptide
  N-term Ac
  MOD_RES (2)..(2): Alpha-Me R8-octenyl-alanine olefin amino acid connected by an all-carbon crosslinker comprising one double bond
  misc_feature (2)..(9): Crosslink between residues
  MOD_RES (9)..(9): Alpha-Me S5-pentenyl-alanine olefin amino acid connected by an all-carbon crosslinker comprising one double bond
  C-term NH2
FAAYWELLAA

SEQ ID NO: 841 - protein, 10 aa, Artificial Sequence
  Description of Artificial Sequence: Synthetic peptide
  N-term Ac
  MOD_RES (2)..(2): Alpha-Me R8-octenyl-alanine olefin amino acid connected by an all-carbon crosslinker comprising one double bond
  misc_feature (2)..(9): Crosslink between residues
  MOD_RES (9)..(9): Alpha-Me S5-pentenyl-alanine olefin amino acid connected by an all-carbon crosslinker comprising one double bond
  C-term NH2
FAAYWQLLAA

SEQ ID NO: 842 - protein, 14 aa, Artificial Sequence
  Description of Artificial Sequence: Synthetic peptide
  N-term Ac
  MOD_RES (1)..(1): Norleucine
  MOD_RES (5)..(5): Alpha-Me R8-octenyl-alanine olefin amino acid connected by an all-carbon crosslinker comprising one double bond
  misc_feature (5)..(12): Crosslink between residues
  MOD_RES (12)..(12): Alpha-Me S5-pentenyl-alanine olefin amino acid connected by an all-carbon crosslinker comprising one double bond
  C-term NH2
LPRFANYWELLAQN

SEQ ID NO: 843 - protein, 14 aa, Artificial Sequence
  Description of Artificial Sequence: Synthetic peptide
  N-term Ac
  MOD_RES (1)..(1): Norleucine
  MOD_RES (5)..(5): Alpha-Me R8-octenyl-alanine olefin amino acid connected by an all-carbon crosslinker comprising one double bond
  misc_feature (5)..(12): Crosslink between residues
  MOD_RES (12)..(12): Alpha-Me S5-pentenyl-alanine olefin amino acid connected by an all-carbon crosslinker comprising one double bond
  C-term NH2
LPRFADYWRLLAQN

SEQ ID NO: 844 - protein, 13 aa, Artificial Sequence
  Description of Artificial Sequence: Synthetic peptide
  N-term Ac
  MOD_RES (1)..(1): Norleucine
  MOD_RES (5)..(5): Alpha-Me R8-octenyl-alanine olefin amino acid connected by an all-carbon crosslinker comprising one double bond
  misc_feature (5)..(12): Crosslink between residues
  MOD_RES (12)..(12): Alpha-Me S5-pentenyl-alanine olefin amino acid connected by an all-carbon crosslinker comprising one double bond
  C-term NH2
LPRFANYWRLLAQ

SEQ ID NO: 845 - protein, 12 aa, Artificial Sequence
  Description of Artificial Sequence: Synthetic peptide
  N-term Ac
  MOD_RES (1)..(1): Norleucine
  MOD_RES (5)..(5): Alpha-Me R8-octenyl-alanine olefin amino acid connected by an all-carbon crosslinker comprising one double bond
  misc_feature (5)..(12): Crosslink between residues
  MOD_RES (12)..(12): Alpha-Me S5-pentenyl-alanine olefin amino acid connected by an all-carbon crosslinker comprising one double bond
  C-term NH2
LPRFANYWRLLA

SEQ ID NO: 846 - protein, 16 aa, Artificial Sequence
  Description of Artificial Sequence: Synthetic peptide
  N-term Ac
  MOD_RES (7)..(7): Alpha-Me R8-octenyl-alanine olefin amino acid connected by an all-carbon crosslinker comprising one double bond
  misc_feature (7)..(14): Crosslink between residues
  MOD_RES (14)..(14): Alpha-Me S5-pentenyl-alanine olefin amino acid connected by an all-carbon crosslinker comprising one double bond
  C-term NH2
QSQQTFADLWRLLAQN

SEQ ID NO: 847 - protein, 16 aa, Artificial Sequence
  Description of Artificial Sequence: Synthetic peptide
  N-term Ac
  MOD_RES (7)..(7): Alpha-Me R8-octenyl-alanine olefin amino acid connected by an all-carbon crosslinker comprising one double bond
  misc_feature (7)..(14): Crosslink between residues
  MOD_RES (14)..(14): Alpha-Me S5-pentenyl-alanine olefin amino acid connected by an all-carbon crosslinker comprising one double bond
  C-term NH2
QSQQTFANLWRLLAEN

SEQ ID NO: 848 - protein, 16 aa, Artificial Sequence
  Description of Artificial Sequence: Synthetic peptide
  N-term Ac
  MOD_RES (7)..(7): Alpha-Me R8-octenyl-alanine olefin amino acid connected by an all-carbon crosslinker comprising one double bond
  misc_feature (7)..(14): Crosslink between residues
  MOD_RES (14)..(14): Alpha-Me S5-pentenyl-alanine olefin amino acid connected by an all-carbon crosslinker comprising one double bond
  C-term NH2
QSQQTFANLWRLLAQD

SEQ ID NO: 849 - protein, 15 aa, Artificial Sequence
  Description of Artificial Sequence: Synthetic peptide
  N-term Ac
  MOD_RES (7)..(7): Alpha-Me R8-octenyl-alanine olefin amino acid connected by an all-carbon crosslinker comprising one double bond
  misc_feature (7)..(14): Crosslink between residues
  MOD_RES (14)..(14): Alpha-Me S5-pentenyl-alanine olefin amino acid connected by an all-carbon crosslinker comprising one double bond
  C-term NH2
QSQQTFANLWRLLAS

SEQ ID NO: 850 - protein, 16 aa, Artificial Sequence
  Description of Artificial Sequence: Synthetic peptide
  N-term Ac
  MOD_RES (7)..(7): Alpha-Me R8-octenyl-alanine olefin amino acid connected by an all-carbon crosslinker comprising one double bond
  misc_feature (7)..(14): Crosslink between residues
  MOD_RES (14)..(14): Alpha-Me S5-pentenyl-alanine olefin amino acid connected by an all-carbon crosslinker comprising one double bond
  C-term NH2
ESQQTFANLWRLLAQN

SEQ ID NO: 851 - protein, 12 aa, Artificial Sequence
  Description of Artificial Sequence: Synthetic peptide
  N-term Ac
  MOD_RES (4)..(4): Alpha-Me R8-octenyl-alanine olefin amino acid connected by an all-carbon crosslinker comprising one double bond
  misc_feature (4)..(11): Crosslink between residues
  MOD_RES (9)..(9): Norleucine
  MOD_RES (11)..(11): Alpha-Me S5-pentenyl-alanine olefin amino acid connected by an all-carbon crosslinker comprising one double bond
  C-term NH2
LTFANLWRLLAQ

SEQ ID NO: 852 - protein, 12 aa, Artificial Sequence
  Description of Artificial Sequence: Synthetic peptide
  N-term Ac
  MOD_RES (4)..(4): Alpha-Me R8-octenyl-alanine olefin amino acid connected by an all-carbon crosslinker comprising one double bond
  misc_feature (4)..(11): Crosslink between residues
  MOD_RES (9)..(9): Norleucine
  MOD_RES (11)..(11): Alpha-Me S5-pentenyl-alanine olefin amino acid connected by an all-carbon crosslinker comprising one double bond
  C-term NH2
LRFANLWRLLAQ

SEQ ID NO: 853 - protein, 16 aa, Artificial Sequence
  Description of Artificial Sequence: Synthetic peptide
  N-term Ac
  MOD_RES (7)..(7): Alpha-Me R8-octenyl-alanine olefin amino acid connected by an all-carbon crosslinker comprising one double bond
  misc_feature (7)..(14): Crosslink between residues
  MOD_RES (12)..(12): Norleucine
  MOD_RES (14)..(14): Alpha-Me S5-pentenyl-alanine olefin amino acid connected by an all-carbon crosslinker comprising one double bond
  C-term NH2
QSQQTFANWWRLLAQN

SEQ ID NO: 854 - protein, 15 aa, Artificial Sequence
  Description of Artificial Sequence: Synthetic peptide
  N-term Ac
  MOD_RES (7)..(7): Alpha-Me R8-octenyl-alanine olefin amino acid connected by an all-carbon crosslinker comprising one double bond
  misc_feature (7)..(14): Crosslink between residues
  MOD_RES (12)..(12): Norleucine
  MOD_RES (14)..(14): Alpha-Me S5-pentenyl-alanine olefin amino acid connected by an all-carbon crosslinker comprising one double bond
  C-term NH2
QSQQTFANLWRLLAQ

SEQ ID NO: 855 - protein, 13 aa, Artificial Sequence
  Description of Artificial Sequence: Synthetic peptide
  N-term Ac
  MOD_RES (4)..(4): Alpha-Me R8-octenyl-alanine olefin amino acid connected by an all-carbon crosslinker comprising one double bond
  misc_feature (4)..(11): Crosslink between residues
  MOD_RES (9)..(9): Norleucine
  MOD_RES (11)..(11): Alpha-Me S5-pentenyl-alanine olefin amino acid connected by an all-carbon crosslinker comprising one double bond
  C-term NH2
QTFANLWRLLAQN

SEQ ID NO: 856 - protein, 14 aa, Artificial Sequence
  Description of Artificial Sequence: Synthetic peptide
  N-term Ac
  MOD_RES (1)..(1): Norleucine
  MOD_RES (5)..(5): Alpha-Me R8-octenyl-alanine olefin amino acid connected by an all-carbon crosslinker comprising one double bond
  misc_feature (5)..(12): Crosslink between residues
  MOD_RES (12)..(12): Alpha-Me S5-pentenyl-alanine olefin amino acid connected by an all-carbon crosslinker comprising one double bond
  C-term NH2
LPRFANWWRLLAQN

SEQ ID NO: 857 - protein, 13 aa, Artificial Sequence
  Description of Artificial Sequence: Synthetic peptide
  N-term Ac
  MOD_RES (1)..(1): Norleucine
  MOD_RES (5)..(5): Alpha-Me R8-octenyl-alanine olefin amino acid connected by an all-carbon crosslinker comprising one double bond
  misc_feature (5)..(12): Crosslink between residues
  MOD_RES (12)..(12): Alpha-Me S5-pentenyl-alanine olefin amino acid connected by an all-carbon crosslinker comprising one double bond
  C-term NH2
LPRFANWWRLLAA

SEQ ID NO: 858 - protein, 10 aa, Artificial Sequence
  Description of Artificial Sequence: Synthetic peptide
  N-term Ac
  C-term NH2
TSFAEYWNLL

SEQ ID NO: 859 - protein, 12 aa, Artificial Sequence
  Description of Artificial Sequence: Synthetic peptide
  N-term Ac
  MOD_RES (4)..(4): Alpha-Me R8-octenyl-alanine olefin amino acid connected by an all-carbon crosslinker comprising one double bond
  misc_feature (4)..(11): Crosslink between residues
  MOD_RES (11)..(11): Alpha-Me S5-pentenyl-alanine olefin amino acid connected by an all-carbon crosslinker comprising one double bond
  C-term NH2
QTFAHWWSQLAS

SEQ ID NO: 860 - protein, 8 aa, Artificial Sequence
  Description of Artificial Sequence: Synthetic peptide
  N-term Ac
  MOD_RES (3)..(3): Alpha-Me S5-pentenyl-alanine olefin amino acid connected by an all-carbon crosslinker comprising one double bond
  misc_feature (3)..(7): Crosslink between residues
  MOD_RES (7)..(7): Alpha-Me S5-pentenyl-alanine olefin amino acid connected by an all-carbon crosslinker comprising one double bond
  C-term NH2
FMAYWEAL

SEQ ID NO: 861 - protein, 12 aa, Artificial Sequence
  Description of Artificial Sequence: Synthetic peptide
  N-term Ac
  C-term NH2
QTFEHWWSQLLS

SEQ ID NO: 862 - protein, 16 aa, Artificial Sequence
  Description of Artificial Sequence: Synthetic peptide
  N-term Ac
  MOD_RES (7)..(7): Alpha-Me R8-octenyl-alanine olefin amino acid connected by an all-carbon crosslinker comprising one double bond
  misc_feature (7)..(14): Crosslink between residues
  MOD_RES (10)..(10): Alpha-Me-Trp
  MOD_RES (13)..(13): Norleucine
  MOD_RES (14)..(14): Alpha-Me S5-pentenyl-alanine olefin amino acid connected by an all-carbon crosslinker comprising one double bond
  C-term NH2
QSQQTFANLWRLLAQN

SEQ ID NO: 863 - protein, 8 aa, Artificial Sequence
  Description of Artificial Sequence: Synthetic peptide
  N-term Ac
  MOD_RES (3)..(3): 2-aminoisobutyric acid
  MOD_RES (5)..(5): 6cl-Trp
  MOD_RES (7)..(7): Ac3c
  C-term NH2
FMXYWEXL

SEQ ID NO: 864 - protein, 8 aa, Artificial Sequence
  Description of Artificial Sequence: Synthetic peptide
  N-term Ac
  MOD_RES (2)..(2): Norleucine
  MOD_RES (3)..(3): Alpha-Me S5-pentenyl-alanine olefin amino acid connected by an all-carbon crosslinker comprising one double bond
  misc_feature (3)..(7): Crosslink between residues
  MOD_RES (5)..(5): 6cl-Trp
  MOD_RES (7)..(7): Alpha-Me S5-pentenyl-alanine olefin amino acid connected by an all-carbon crosslinker comprising one double bond
  C-term NH2
FLAYWEAL

SEQ ID NO: 865 - protein, 9 aa, Artificial Sequence
  Description of Artificial Sequence: Synthetic peptide
  N-term Ac
  MOD_RES (2)..(2): Alpha-Me R8-octenyl-alanine olefin amino acid connected by an all-carbon crosslinker comprising one Z configured double bond
  misc_feature (2)..(9): Crosslink between residues
  MOD_RES (5)..(5): 6cl-Trp
  MOD_RES (7)..(7): Ac3c
  MOD_RES (9)..(9): Alpha-Me S5-pentenyl-alanine olefin amino acid connected by an all-carbon crosslinker comprising one Z configured double bond
  C-term NH2
FAAYWEXLA

SEQ ID NO: 866 - protein, 10 aa, Artificial Sequence
  Description of Artificial Sequence: Synthetic peptide
  N-term Ac
  MOD_RES (2)..(2): Alpha-Me R8-octenyl-alanine olefin amino acid connected by an all-carbon crosslinker comprising one double bond
  misc_feature (2)..(9): Crosslink between residues
  MOD_RES (5)..(5): 6cl-Trp
  MOD_RES (7)..(7): Ac3c
  MOD_RES (9)..(9): Alpha-Me S5-pentenyl-alanine olefin amino acid connected by an all-carbon crosslinker comprising one double bond
  C-term NH2
FAAYWEXLAA

SEQ ID NO: 867 - protein, 14 aa, Artificial Sequence
  Description of Artificial Sequence: Synthetic peptide
  N-term Ac
  MOD_RES (1)..(1): Norleucine
  MOD_RES (5)..(5): Alpha-Me R8-octenyl-alanine olefin amino acid connected by an all-carbon crosslinker comprising one double bond
  misc_feature (5)..(12): Crosslink between residues
  MOD_RES (8)..(8): 6cl-Trp
  MOD_RES (12)..(12): Alpha-Me S5-pentenyl-alanine olefin amino acid connected by an all-carbon crosslinker comprising one double bond
  C-term NH2
LPRFANYWRLLAQN

SEQ ID NO: 868 - protein, 11 aa, Artificial Sequence
  Description of Artificial Sequence: Synthetic peptide
  N-term Ac
  MOD_RES (3)..(3): Alpha-Me R8-octenyl-alanine olefin amino acid connected by an all-carbon crosslinker comprising one double bond
  misc_feature (3)..(10): Crosslink between residues
  MOD_RES (10)..(10): Alpha-Me S5-pentenyl-alanine olefin amino acid connected by an all-carbon crosslinker comprising one double bond
  C-term NH2
AFAAAWALAAA

SEQ ID NO: 869 - protein, 11 aa, Artificial Sequence
  Description of Artificial Sequence: Synthetic peptide
  MOD_RES (3)..(3): Alpha-Me R8-octenyl-alanine olefin amino acid connected by an all-carbon crosslinker comprising one double bond
  misc_feature (3)..(10): Crosslink between residues
  MOD_RES (10)..(10): Alpha-Me S5-pentenyl-alanine olefin amino acid connected by an all-carbon crosslinker comprising one double bond
  C-term NH2
TFAAAWRLAAQ

SEQ ID NO: 870 - protein, 11 aa, Artificial Sequence
  Description of Artificial Sequence: Synthetic peptide
  N-term Pr
  MOD_RES (3)..(3): Alpha-Me R8-octenyl-alanine olefin amino acid connected by an all-carbon crosslinker comprising one double bond
  misc_feature (3)..(10): Crosslink between residues
  MOD_RES (10)..(10): Alpha-Me S5-pentenyl-alanine olefin amino acid connected by an all-carbon crosslinker comprising one double bond
  C-term NH2
TFAAAWRLAAQ

SEQ ID NO: 871 - protein, 16 aa, Artificial Sequence
  Description of Artificial Sequence: Synthetic peptide
  N-term Ac
  MOD_RES (7)..(7): Alpha-Me R8-octenyl-alanine olefin amino acid connected by an all-carbon crosslinker comprising no double bonds
  misc_feature (7)..(14): Crosslink between residues
  MOD_RES (12)..(12): Norleucine
  MOD_RES (14)..(14): Alpha-Me S5-pentenyl-alanine olefin amino acid connected by an all-carbon crosslinker comprising no double bonds
  C-term NH2
QSQQTFANLWRLLAQN

SEQ ID NO: 872 - protein, 13 aa, Artificial Sequence
  Description of Artificial Sequence: Synthetic peptide
  N-term Ac
  MOD_RES (4)..(4): Alpha-Me R8-octenyl-alanine olefin amino acid connected by an all-carbon crosslinker comprising no double bonds
  misc_feature (4)..(11): Crosslink between residues
  MOD_RES (11)..(11): Alpha-Me S5-pentenyl-alanine olefin amino acid connected by an all-carbon crosslinker comprising no double bonds
  C-term NH2
LTFAHYWAQLASA

SEQ ID NO: 873 - protein, 14 aa, Artificial Sequence
  Description of Artificial Sequence: Synthetic peptide
  N-term Ac
  MOD_RES (1)..(1): Norleucine
  MOD_RES (5)..(5): Alpha-Me R8-octenyl-alanine olefin amino acid connected by an all-carbon crosslinker comprising no double bonds
  misc_feature (5)..(12): Crosslink between residues
  MOD_RES (12)..(12): Alpha-Me S5-pentenyl-alanine olefin amino acid connected by an all-carbon crosslinker comprising no double bonds
  C-term NH2
LPRFANYWRLLAQN

SEQ ID NO: 874 - protein, 14 aa, Artificial Sequence
  Description of Artificial Sequence: Synthetic peptide
  N-term Ac
  MOD_RES (1)..(1): Norleucine
  MOD_RES (5)..(5): Alpha-Me R8-octenyl-alanine olefin amino acid connected by an all-carbon crosslinker comprising no double bonds
  misc_feature (5)..(12): Crosslink between residues
  MOD_RES (8)..(8): 6cl-Trp
  MOD_RES (12)..(12): Alpha-Me S5-pentenyl-alanine olefin amino acid connected by an all-carbon crosslinker comprising no double bonds
  C-term NH2
LPRFANYWRLLAQN

SEQ ID NO: 875 - protein, 12 aa, Artificial Sequence
  Description of Artificial Sequence: Synthetic peptide
  N-term Ac
  MOD_RES (4)..(4): Alpha-Me R8-octenyl-alanine olefin amino acid connected by an all-carbon crosslinker comprising no double bonds
  misc_feature (4)..(11): Crosslink between residues
  MOD_RES (7)..(7): 6cl-Trp
  MOD_RES (11)..(11): Alpha-Me S5-pentenyl-alanine olefin amino acid connected by an all-carbon crosslinker comprising no double bonds
  C-term NH2
LTFAHYWAQLAS

SEQ ID NO: 876 - protein, 16 aa, Artificial Sequence
  Description of Artificial Sequence: Synthetic peptide
  N-term Ac
  MOD_RES (3)..(3): Alpha-Me S5-pentenyl-alanine olefin amino acid connected by an all-carbon crosslinker comprising no double bonds
  misc_feature (3)..(7): Crosslink between residues
  MOD_RES (7)..(7): Amino acid comprising two pentenyl-alanine olefin side chains, each of which is crosslinked to another amino acid as indicated via fully saturated hydrocarbon crosslinks
  misc_feature (7)..(14): Crosslink between residues
  MOD_RES (14)..(14): Alpha-Me R8-octenyl-alanine olefin amino acid connected by an all carbon crosslinker comprising no double bonds
  C-term NH2
QSAQTFANLWRLLAQN

SEQ ID NO: 877 - protein, 12 aa, Artificial Sequence
  Description of Artificial Sequence: Synthetic peptide
  N-term Ac
  MOD_RES (4)..(4): Alpha-Me R8-octenyl-alanine olefin amino acid connected by an all-carbon crosslinker comprising no double bonds
  misc_feature (4)..(11): Crosslink between residues
  MOD_RES (7)..(7): 6cl-Trp
  MOD_RES (11)..(11): Alpha-Me S5-pentenyl-alanine olefin amino acid connected by an all-carbon crosslinker comprising no double bonds
  C-term NH2
LTFAHYWRQLAS

SEQ ID NO: 878 - protein, 16 aa, Artificial Sequence
  Description of Artificial Sequence: Synthetic peptide
  N-term Ac
  MOD_RES (7)..(7): Alpha-Me R8-octenyl-alanine olefin amino acid connected by an all-carbon crosslinker comprising no double bonds
  misc_feature (7)..(14): Crosslink between residues
  MOD_RES (10)..(10): 6cl-Trp
  MOD_RES (14)..(14): Alpha-Me S5-pentenyl-alanine olefin amino acid connected by an all-carbon crosslinker comprising no double bonds
  C-term NH2
QSQQTFANLWRLLAQN

SEQ ID NO: 879 - protein, 16 aa, Artificial Sequence
  Description of Artificial Sequence: Synthetic peptide
  N-term Ac
  MOD_RES (1)..(1): Alpha-Me R8-octenyl-alanine olefin amino acid connected by an all-carbon crosslinker comprising no double bonds
  misc_feature (1)..(8): Crosslink between residues
  MOD_RES (8)..(8): Alpha-Me S5-pentenyl-alanine olefin amino acid connected by an all-carbon crosslinker comprising no double bonds
  MOD_RES (14)..(14): 2-aminoisobutyric acid
  C-term NH2
ASQQTFSALWRLLXQN

SEQ ID NO: 880 - protein, 12 aa, Artificial Sequence
  Description of Artificial Sequence: Synthetic peptide
  N-term Ac
  MOD_RES (4)..(4): Alpha-Me R8-octenyl-alanine olefin amino acid connected by an all-carbon crosslinker comprising no double bonds
  misc_feature (4)..(11): Crosslink between residues
  MOD_RES (11)..(11): Alpha-Me S5-pentenyl-alanine olefin amino acid connected by an all-carbon crosslinker comprising no double bonds
  C-term NH2
LTFAHYWAQLAS

SEQ ID NO: 881 - protein, 12 aa, Artificial Sequence
  Description of Artificial Sequence: Synthetic peptide
  N-term Ac
  MOD_RES (4)..(4): Alpha-Me R8-octenyl-alanine olefin amino acid connected by an all-carbon crosslinker comprising no double bonds
  misc_feature (4)..(11): Crosslink between residues
  MOD_RES (11)..(11): Alpha-Me S5-pentenyl-alanine olefin amino acid connected by an all-carbon crosslinker comprising no double bonds
  C-term NH2
TSFAQYWNLLAP

SEQ ID NO: 882 - protein, 12 aa, Artificial Sequence
  Description of Artificial Sequence: Synthetic peptide
  N-term Ac
  C-term NH2
LTFEHYWAQLTS

SEQ ID NO: 883 - protein, 9 aa, Artificial Sequence
  Description of Artificial Sequence: Synthetic peptide
  N-term Ac
  MOD_RES (2)..(2): Alpha-Me R8-octenyl-alanine olefin amino acid connected by an all-carbon crosslinker comprising one E configured double bond
  misc_feature (2)..(9): Crosslink between residues
  MOD_RES (5)..(5): 6cl-Trp
  MOD_RES (7)..(7): Ac3c
  MOD_RES (9)..(9): Alpha-Me S5-pentenyl-alanine olefin amino acid connected by an all-carbon crosslinker comprising one E configured double bond
  C-term NH2
FAAYWEXLA

SEQ ID NO: 884 - protein, 11 aa, Artificial Sequence
  Description of Artificial Sequence: Synthetic peptide
  N-term Ac
  MOD_RES (3)..(3): Alpha-Me R8-octenyl-alanine olefin amino acid connected by an all-carbon crosslinker comprising one double bond
  misc_feature (3)..(10): Crosslink between residues
  MOD_RES (10)..(10): Alpha-Me S5-pentenyl-alanine olefin amino acid connected by an all-carbon crosslinker comprising one double bond
  C-term NH2
AFAAAWALAAA

SEQ ID NO: 885 - protein, 11 aa, Artificial Sequence
  Description of Artificial Sequence: Synthetic peptide
  N-term Ac
  MOD_RES (3)..(3): Alpha-Me R8-octenyl-alanine olefin amino acid connected by an all-carbon crosslinker comprising one double bond
  misc_feature (3)..(10): Crosslink between residues
  MOD_RES (10)..(10): Alpha-Me S5-pentenyl-alanine olefin amino acid connected by an all-carbon crosslinker comprising one double bond
  C-term NH2
TFAAAWRLAAQ

SEQ ID NO: 886 - protein, 11 aa, Artificial Sequence
  Description of Artificial Sequence: Synthetic peptide
  N-term Pr
  MOD_RES (3)..(3): Alpha-Me R8-octenyl-alanine olefin amino acid connected by an all-carbon crosslinker comprising one double bond
  misc_feature (3)..(10): Crosslink between residues
  MOD_RES (10)..(10): Alpha-Me S5-pentenyl-alanine olefin amino acid connected by an all-carbon crosslinker comprising one double bond
  C-term NH2
TFAAAWRLAAQ

SEQ ID NO: 887 - protein, 12 aa, Artificial Sequence
  Description of Artificial Sequence: Synthetic peptide
  N-term Ac
  MOD_RES (4)..(4): Alpha-Me R8-octenyl-alanine olefin amino acid connected by an all-carbon crosslinker comprising one E configured double bond
  misc_feature (4)..(11): Crosslink between residues
  MOD_RES (11)..(11): Alpha-Me S5-pentenyl-alanine olefin amino acid connected by an all-carbon crosslinker comprising one E configured double bond
  C-term NH2
LTFAHYWAQLAS

SEQ ID NO: 888 - protein, 23 aa, Artificial Sequence
  Description of Artificial Sequence: Synthetic peptide
  N-term Ac
  MOD_RES (7)..(7): Beta-Ala
  MOD_RES (14)..(14): Alpha-Me R8-octenyl-alanine olefin amino acid connected by an all-carbon crosslinker comprising one double bond
  misc_feature (14)..(21): Crosslink between residues
  MOD_RES (21)..(21): Alpha-Me S5-pentenyl-alanine olefin amino acid connected by an all-carbon crosslinker comprising one double bond
  C-term NH2
CCPGCCAQSQQTFANLWRLLAQN

SEQ ID NO: 889 - protein, 23 aa, Artificial Sequence
  Description of Artificial Sequence: Synthetic peptide
  N-term Ac
  MOD_RES (7)..(7): Beta-Ala
  MOD_RES (14)..(14): Alpha-Me R8-octenyl-alanine olefin amino acid connected by an all-carbon crosslinker comprising one double bond
  misc_feature (14)..(21): Crosslink between residues
  MOD_RES (21)..(21): Alpha-Me S5-pentenyl-alanine olefin amino acid connected by an all-carbon crosslinker comprising one double bond
  C-term NH2
CCPGCCAQSQQTAANLWRLLAQN

SEQ ID NO: 890 - protein, 21 aa, Artificial Sequence
  Description of Artificial Sequence: Synthetic peptide
  N-term Ac
  MOD_RES (7)..(7): Beta-Ala
  MOD_RES (8)..(8): Norleucine
  MOD_RES (12)..(12): Alpha-Me R8-octenyl-alanine olefin amino acid connected by an all-carbon crosslinker comprising one double bond
  misc_feature (12)..(19): Crosslink between residues
  MOD_RES (19)..(19): Alpha-Me S5-pentenyl-alanine olefin amino acid connected by an all-carbon crosslinker comprising one double bond
  C-term NH2
CCPGCCALPRFANYWRLLAQN

SEQ ID NO: 891 - protein, 12 aa, Artificial Sequence
  Description of Artificial Sequence: Synthetic peptide
  N-term Ac
  MOD_RES (4)..(4): Alpha-Me R8-octenyl-alanine olefin amino acid that is not connected by a crosslinker
  MOD_RES (11)..(11): Alpha-Me S5-pentenyl-alanine olefin amino acid that is not connected by a crosslinker
  C-term NH2
LTFAHYWAQLAS

SEQ ID NO: 892 - protein, 9 aa, Artificial Sequence
  Description of Artificial Sequence: Synthetic peptide
  N-term Ac
  MOD_RES (2)..(2): Alpha-Me R8-octenyl-alanine olefin amino acid connected by an all-carbon crosslinker comprising no double bonds
  misc_feature (2)..(9): Crosslink between residues
  MOD_RES (5)..(5): 6cl-Trp
  MOD_RES (7)..(7): Ac3c
  MOD_RES (9)..(9): Alpha-Me S5-pentenyl-alanine olefin amino acid connected by an all-carbon crosslinker comprising no double bonds
  C-term NH2
FAHYWRXLA

SEQ ID NO: 893 - protein, 12 aa, Artificial Sequence
  Description of Artificial Sequence: Synthetic peptide
  N-term Ac
  MOD_RES (4)..(4): Alpha-Me R8-octenyl-alanine olefin amino acid connected by an all-carbon crosslinker comprising no double bonds
  misc_feature (4)..(11): Crosslink between residues
  MOD_RES (11)..(11): Alpha-Me S5-pentenyl-alanine olefin amino acid connected by an all-carbon crosslinker comprising no double bonds
  C-term NH2
QTFAHWWSQLAS

SEQ ID NO: 894 - protein, 12 aa, Artificial Sequence
  Description of Artificial Sequence: Synthetic peptide
  N-term Ac
  MOD_RES (4)..(4): Alpha-Me R8-octenyl-alanine olefin amino acid connected by an all-carbon crosslinker comprising one double bond
  misc_feature (4)..(11): Crosslink between residues
  MOD_RES (11)..(11): Alpha-Me S5-pentenyl-alanine olefin amino acid connected by an all-carbon crosslinker comprising one double bond
  C-term NH2
LTAAHYWRQLAS

SEQ ID NO: 895 - protein, 16 aa, Artificial Sequence
  Description of Artificial Sequence: Synthetic peptide
  N-term Ac
  MOD_RES (2)..(2): Alpha-Me R8-octenyl-alanine olefin amino acid connected by an all-carbon crosslinker comprising one double bond
  misc_feature (2)..(9): Crosslink between residues
  MOD_RES (9)..(9): Alpha-Me S5-pentenyl-alanine olefin amino acid connected by an all-carbon crosslinker comprising one double bond
  MOD_RES (14)..(14): 2-aminoisobutyric acid
  C-term NH2
QAQQTFSNAWRLLXQN

SEQ ID NO: 896 - protein, 16 aa, Artificial Sequence
  Description of Artificial Sequence: Synthetic peptide
  N-term Ac
  MOD_RES (5)..(5): Alpha-Me R8-octenyl-alanine olefin amino acid connected by an all-carbon crosslinker comprising one double bond
  misc_feature (5)..(12): Crosslink between residues
  MOD_RES (12)..(12): Alpha-Me S5-pentenyl-alanine olefin amino acid connected by an all-carbon crosslinker comprising one double bond
  MOD_RES (14)..(14): 2-aminoisobutyric acid
  C-term NH2
QSQQAFSNLWRALXQN

SEQ ID NO: 897 - protein, 10 aa, Artificial Sequence
  Description of Artificial Sequence: Synthetic peptide
  N-term Ac
  MOD_RES (2)..(2): Alpha-Me R8-octenyl-alanine olefin amino acid connected by an all-carbon crosslinker comprising one double bond
  misc_feature (2)..(9): Crosslink between residues
  MOD_RES (7)..(7): Ac3c
  MOD_RES (9)..(9): Alpha-Me S5-pentenyl-alanine olefin amino acid connected by an all-carbon crosslinker comprising one double bond
  C-term NH2
FAAYWEXLAA

SEQ ID NO: 898 - protein, 10 aa, Artificial Sequence
  Description of Artificial Sequence: Synthetic peptide
  N-term Ac
  MOD_RES (2)..(2): Alpha-Me R8-octenyl-alanine olefin amino acid connected by an all-carbon crosslinker comprising one double bond
  misc_feature (2)..(9): Crosslink between residues
  MOD_RES (7)..(7): Ac3c
  MOD_RES (9)..(9): Alpha-Me S5-pentenyl-alanine olefin amino acid connected by an all-carbon crosslinker comprising one double bond
  C-term NH2
FAAYWEXLAS

SEQ ID NO: 899 - protein, 10 aa, Artificial Sequence
  Description of Artificial Sequence: Synthetic peptide
  N-term Ac
  MOD_RES (2)..(2): Alpha-Me R8-octenyl-alanine olefin amino acid connected by an all-carbon crosslinker comprising one double bond
  misc_feature (2)..(9): Crosslink between residues
  MOD_RES (7)..(7): Ac3c
  MOD_RES (9)..(9): Alpha-Me S5-pentenyl-alanine olefin amino acid connected by an all-carbon crosslinker comprising one double bond
  C-term NH2
FAAYWEXLAQ

SEQ ID NO: 900 - protein, 10 aa, Artificial Sequence
  Description of Artificial Sequence: Synthetic peptide
  N-term Ac
  MOD_RES (2)..(2): Alpha-Me R8-octenyl-alanine olefin amino acid connected by an all-carbon crosslinker comprising one double bond
  misc_feature (2)..(9): Crosslink between residues
  MOD_RES (7)..(7): 2-aminoisobutyric acid
  MOD_RES (9)..(9): Alpha-Me S5-pentenyl-alanine olefin amino acid connected by an all-carbon crosslinker comprising one double bond
  C-term NH2
FAAYWEXLAS

SEQ ID NO: 901 - protein, 10 aa, Artificial Sequence
  Description of Artificial Sequence: Synthetic peptide
  N-term Ac
  MOD_RES (2)..(2): Alpha-Me R8-octenyl-alanine olefin amino acid connected by an all-carbon crosslinker comprising one double bond
  misc_feature (2)..(9): Crosslink between residues
  MOD_RES (9)..(9): Alpha-Me S5-pentenyl-alanine olefin amino acid connected by an all-carbon crosslinker comprising one double bond
  C-term NH2
FAAYWEALAS

SEQ ID NO: 902 - protein, 10 aa, Artificial Sequence
  Description of Artificial Sequence: Synthetic peptide
  N-term Ac
  MOD_RES (2)..(2): Alpha-Me R8-octenyl-alanine olefin amino acid connected by an all-carbon crosslinker comprising one double bond
  misc_feature (2)..(9): Crosslink between residues
  MOD_RES (9)..(9): Alpha-Me S5-pentenyl-alanine olefin amino acid connected by an all-carbon crosslinker comprising one double bond
  C-term NH2
FAAYWEQLAS

SEQ ID NO: 903 - protein, 10 aa, Artificial Sequence
  Description of Artificial Sequence: Synthetic peptide
  N-term Ac
  MOD_RES (2)..(2): Alpha-Me R8-octenyl-alanine olefin amino acid connected by an all-carbon crosslinker comprising one double bond
  misc_feature (2)..(9): Crosslink between residues
  MOD_RES (9)..(9): Alpha-Me S5-pentenyl-alanine olefin amino acid connected by an all-carbon crosslinker comprising one double bond
  C-term NH2
FAHYWEQLAS

SEQ ID NO: 904 - protein, 10 aa, Artificial Sequence
  Description of Artificial Sequence: Synthetic peptide
  N-term Ac
  MOD_RES (2)..(2): Alpha-Me R8-octenyl-alanine olefin amino acid connected by an all-carbon crosslinker comprising one double bond
  misc_feature (2)..(9): Crosslink between residues
  MOD_RES (9)..(9): Alpha-Me S5-pentenyl-alanine olefin amino acid connected by an all-carbon crosslinker comprising one double bond
  C-term NH2
FAHYWAQLAS

SEQ ID NO: 905 - protein, 10 aa, Artificial Sequence
  Description of Artificial Sequence: Synthetic peptide
  N-term Ac
  MOD_RES (2)..(2): Alpha-Me R8-octenyl-alanine olefin amino acid connected by an all-carbon crosslinker comprising one double bond
  misc_feature (2)..(9): Crosslink between residues
  MOD_RES (7)..(7): Ac3c
  MOD_RES (9)..(9): Alpha-Me S5-pentenyl-alanine olefin amino acid connected by an all-carbon crosslinker comprising one double bond
  C-term NH2
FAHYWAXLAS

SEQ ID NO: 906 - protein, 10 aa, Artificial Sequence
  Description of Artificial Sequence: Synthetic peptide
  N-term Ac
  MOD_RES (2)..(2): Alpha-Me R8-octenyl-alanine olefin amino acid connected by an all-carbon crosslinker comprising one double bond
  misc_feature (2)..(9): Crosslink between residues
  MOD_RES (7)..(7): Ac3c
  MOD_RES (9)..(9): Alpha-Me S5-pentenyl-alanine olefin amino acid connected by an all-carbon crosslinker comprising one double bond
  C-term NH2
FAHYWRXLAS

SEQ ID NO: 907 - protein, 10 aa, Artificial Sequence
  Description of Artificial Sequence: Synthetic peptide
  N-term Ac
  MOD_RES (2)..(2): Alpha-Me R8-octenyl-alanine olefin amino acid connected by an all-carbon crosslinker comprising one double bond
  misc_feature (2)..(9): Crosslink between residues
  MOD_RES (7)..(7): Ac3c
  MOD_RES (9)..(9): Alpha-hydrogen S5-pentenyl-alanine olefin amino acid connected by an all-carbon crosslinker comprising one double bond
  C-term NH2
FAAYWEXLAA

SEQ ID NO: 908 - protein, 14 aa, Artificial Sequence
  Description of Artificial Sequence: Synthetic peptide
  N-term Ac
  MOD_RES (1)..(1): Norleucine
  MOD_RES (5)..(5): Alpha-Me R8-octenyl-alanine olefin amino acid connected by an all-carbon crosslinker comprising no double bonds
  misc_feature (5)..(3): Crosslink between residues
  MOD_RES (12)..(12): Alpha-Me S5-pentenyl-alanine olefin amino acid connected by an all-carbon crosslinker comprising no double bonds
  C-term NH2
LPTFANYWRLLAQN

SEQ ID NO: 909 - protein, 11 aa, Artificial Sequence
  Description of Artificial Sequence: Synthetic peptide
  N-term Ac
  MOD_RES (3)..(3): Alpha-Me R8-octenyl-alanine olefin amino acid connected by an all-carbon crosslinker comprising one double bond
  misc_feature (3)..(10): Crosslink between residues
  MOD_RES (10)..(10): Alpha-Me S5-pentenyl-alanine olefin amino acid connected by an all-carbon crosslinker comprising one double bond
  C-term NH2
TFAAAWRALAQ

SEQ ID NO: 910 - protein, 12 aa, Artificial Sequence
  Description of Artificial Sequence: Synthetic peptide
  N-term Ac
  MOD_RES (4)..(4): Alpha-Me R8-octenyl-alanine olefin amino acid connected by an all-carbon crosslinker comprising no double bonds
  misc_feature (4)..(11): Crosslink between residues
  MOD_RES (11)..(11): Alpha-Me S5-pentenyl-alanine olefin amino acid connected by an all-carbon crosslinker comprising no double bonds
  C-term NH2
TSFAHYWAQLAS

SEQ ID NO: 911 - protein, 10 aa, Artificial Sequence
  Description of Artificial Sequence: Synthetic peptide
  N-term Ac
  MOD_RES (2)..(2): Alpha-Me R8-octenyl-alanine olefin amino acid connected by an all-carbon crosslinker comprising no double bonds
  misc_feature (2)..(9): Crosslink between residues
  MOD_RES (5)..(5): 6cl-Trp
  MOD_RES (7)..(7): Ac3c
  MOD_RES (9)..(9): Alpha-Me S5-pentenyl-alanine olefin amino acid connected by an all-carbon crosslinker comprising no double bonds
  C-term NH2
FAAYWEXLAA

SEQ ID NO: 912 - protein, 12 aa, Artificial Sequence
  Description of Artificial Sequence: Synthetic peptide
  N-term Ac
  MOD_RES (4)..(4): Alpha-Me R8-octenyl-alanine olefin amino acid connected by an all-carbon crosslinker comprising one double bond
  misc_feature (4)..(11): Crosslink between residues
  MOD_RES (11)..(11): Alpha-Me S5-pentenyl-alanine olefin amino acid connected by an all-carbon crosslinker comprising one double bond
  C-term NH2
LTFAHYWAQIAS

SEQ ID NO: 913 - protein, 12 aa, Artificial Sequence
  Description of Artificial Sequence: Synthetic peptide
  N-term Ac
  MOD_RES (4)..(4): Alpha-Me R8-octenyl-alanine olefin amino acid connected by an all-carbon crosslinker comprising one double bond
  misc_feature (4)..(11): Crosslink between residues
  MOD_RES (10)..(10): Norleucine
  MOD_RES (11)..(11): Alpha-Me S5-pentenyl-alanine olefin amino acid connected by an all-carbon crosslinker comprising one double bond
  C-term NH2
LTFAHYWAQLAS

SEQ ID NO: 914 - protein, 12 aa, Artificial Sequence
  Description of Artificial Sequence: Synthetic peptide
  N-term Ac
  MOD_RES (4)..(4): Alpha-Me R8-octenyl-alanine olefin amino acid connected by an all-carbon crosslinker comprising one double bond
  misc_feature (4)..(11): Crosslink between residues
  MOD_RES (11)..(11): Alpha-Me S5-pentenyl-alanine olefin amino acid connected by an all-carbon crosslinker comprising one double bond
  C-term NH2
LTFAHYWAQLAA

SEQ ID NO: 915 - protein, 12 aa, Artificial Sequence
  Description of Artificial Sequence: Synthetic peptide
  N-term Ac
  MOD_RES (4)..(4): Alpha-Me R8-octenyl-alanine olefin amino acid connected by an all-carbon crosslinker comprising one double bond
  misc_feature (4)..(11): Crosslink between residues
  MOD_RES (11)..(11): Alpha-Me S5-pentenyl-alanine olefin amino acid connected by an all-carbon crosslinker comprising one double bond
  MOD_RES (12)..(12): Abu
  C-term NH2
LTFAHYWAQLAX

SEQ ID NO: 916 - protein, 12 aa, Artificial Sequence
  Description of Artificial Sequence: Synthetic peptide
  N-term Ac
  MOD_RES (4)..(4): Alpha-Me R8-octenyl-alanine olefin amino acid connected by an all-carbon crosslinker comprising one double bond
  misc_feature (4)..(11): Crosslink between residues
  MOD_RES (8)..(8): Abu
  MOD_RES (11)..(11): Alpha-Me S5-pentenyl-alanine olefin amino acid connected by an all-carbon crosslinker comprising one double bond
  C-term NH2
LTFAHYWXQLAS

SEQ ID NO: 917 - protein, 12 aa, Artificial Sequence
  Description of Artificial Sequence: Synthetic peptide
  N-term Ac
  MOD_RES (4)..(4): Alpha-Me R8-octenyl-alanine olefin amino acid connected by an all-carbon crosslinker comprising one E configured double bond
  misc_feature (4)..(11): Crosslink between residues
  MOD_RES (11)..(11): Alpha-Me S5-pentenyl-alanine olefin amino acid connected by an all-carbon crosslinker comprising one E configured double bond
  C-term NH2
LTFAAYWAQLAS

SEQ ID NO: 918 - protein, 12 aa, Artificial Sequence
  Description of Artificial Sequence: Synthetic peptide
  N-term Ac
  MOD_RES (4)..(4): Alpha-Me R8-octenyl-alanine olefin amino acid connected by an all-carbon crosslinker comprising one double bond
  misc_feature (4)..(11): Crosslink between residues
  MOD_RES (11)..(11): Alpha-Me S5-pentenyl-alanine olefin amino acid connected by an all-carbon crosslinker comprising one double bond
  C-term NH2
LAFAHYWAQLAS

SEQ ID NO: 919 - protein, 12 aa, Artificial Sequence
  Description of Artificial Sequence: Synthetic peptide
  N-term Ac
  MOD_RES (4)..(4): Alpha-Me R8-octenyl-alanine olefin amino acid connected by an all-carbon crosslinker comprising one double bond
  misc_feature (4)..(11): Crosslink between residues
  MOD_RES (11)..(11): Alpha-Me S5-pentenyl-alanine olefin amino acid connected by an all-carbon crosslinker comprising one double bond
  C-term NH2
LAFAAYWAQLAS

SEQ ID NO: 920 - protein, 12 aa, Artificial Sequence
  Description of Artificial Sequence: Synthetic peptide
  N-term Ac
  MOD_RES (4)..(4): Alpha-Me R8-octenyl-alanine olefin amino acid connected by an all-carbon crosslinker comprising one E configured double bond
  misc_feature (4)..(11): Crosslink between residues
  MOD_RES (11)..(11): Alpha-Me S5-pentenyl-alanine olefin amino acid connected by an all-carbon crosslinker comprising one E configured double bond
  C-term NH2
LTFAAYWAQLAA

SEQ ID NO: 921 - protein, 12 aa, Artificial Sequence
  Description of Artificial Sequence: Synthetic peptide
  N-term Ac
  MOD_RES (4)..(4): Alpha-Me R8-octenyl-alanine olefin amino acid connected by an all-carbon crosslinker comprising one double bond
  misc_feature (4)..(11): Crosslink between residues
  MOD_RES (11)..(11): Alpha-Me S5-pentenyl-alanine olefin amino acid connected by an all-carbon crosslinker comprising one double bond
  C-term NH2
LAFAAYWAQLAA

SEQ ID NO: 922 - protein, 12 aa, Artificial Sequence
  Description of Artificial Sequence: Synthetic peptide
  N-term Ac
  MOD_RES (4)..(4): Alpha-Me R8-octenyl-alanine olefin amino acid connected by an all-carbon crosslinker comprising one double bond
  misc_feature (4)..(11): Crosslink between residues
  MOD_RES (9)..(9): Norleucine
  MOD_RES (11)..(11): Alpha-Me S5-pentenyl-alanine olefin amino acid connected by an all-carbon crosslinker comprising one double bond
  C-term NH2
LTFANLWALLAQ

SEQ ID NO: 923 - protein, 12 aa, Artificial Sequence
  Description of Artificial Sequence: Synthetic peptide
  N-term Ac
  MOD_RES (4)..(4): Alpha-Me R8-octenyl-alanine olefin amino acid connected by an all-carbon crosslinker comprising one double bond
  misc_feature (4)..(11): Crosslink between residues
  MOD_RES (9)..(9): Norleucine
  MOD_RES (11)..(11): Alpha-Me S5-pentenyl-alanine olefin amino acid connected by an all-carbon crosslinker comprising one double bond
  C-term NH2
LTFANLWALLAA

SEQ ID NO: 924 - protein, 12 aa, Artificial Sequence
  Description of Artificial Sequence: Synthetic peptide
  N-term Ac
  MOD_RES (4)..(4): Alpha-Me R8-octenyl-alanine olefin amino acid connected by an all-carbon crosslinker comprising one double bond
  misc_feature (4)..(11): Crosslink between residues
  MOD_RES (9)..(9): Norleucine
  MOD_RES (11)..(11): Alpha-Me S5-pentenyl-alanine olefin amino acid connected by an all-carbon crosslinker comprising one double bond
  C-term NH2
LTFAALWALLAQ

SEQ ID NO: 925 - protein, 12 aa, Artificial Sequence
  Description of Artificial Sequence: Synthetic peptide
  N-term Ac
  MOD_RES (4)..(4): Alpha-Me R8-octenyl-alanine olefin amino acid connected by an all-carbon crosslinker comprising one double bond
  misc_feature (4)..(11): Crosslink between residues
  MOD_RES (9)..(9): Norleucine
  MOD_RES (11)..(11): Alpha-Me S5-pentenyl-alanine olefin amino acid connected by an all-carbon crosslinker comprising one double bond
  C-term NH2
LAFANLWALLAQ

SEQ ID NO: 926 - protein, 12 aa, Artificial Sequence
  Description of Artificial Sequence: Synthetic peptide
  N-term Ac
  MOD_RES (4)..(4): Alpha-Me R8-octenyl-alanine olefin amino acid connected by an all-carbon crosslinker comprising one double bond
  misc_feature (4)..(11): Crosslink between residues
  MOD_RES (9)..(9): Norleucine
  MOD_RES (11)..(11): Alpha-Me S5-pentenyl-alanine olefin amino acid connected by an all-carbon crosslinker comprising one double bond
  C-term NH2
LAFAALWALLAA

SEQ ID NO: 927 - protein, 10 aa, Artificial Sequence
  Description of Artificial Sequence: Synthetic peptide
  N-term Ac
  MOD_RES (2)..(2): Alpha-Me R8-octenyl-alanine olefin amino acid connected by an all-carbon crosslinker comprising one double bond
  misc_feature (2)..(9): Crosslink between residues
  MOD_RES (7)..(7): Ac3c
  MOD_RES (9)..(9): Alpha-Me S5-pentenyl-alanine olefin amino acid connected by an all-carbon crosslinker comprising one double bond
  C-term NH2
AAAYWEXLAA

SEQ ID NO: 928 - protein, 11 aa, Artificial Sequence
  Description of Artificial Sequence: Synthetic peptide
  N-term Ac
  MOD_RES (2)..(2): Alpha-Me R8-octenyl-alanine olefin amino acid connected by an all-carbon crosslinker comprising one double bond
  misc_feature (2)..(9): Crosslink between residues
  MOD_RES (7)..(7): Ac3c
  MOD_RES (9)..(9): Alpha-Me S5-pentenyl-alanine olefin amino acid connected by an all-carbon crosslinker comprising one double bond
  C-term NH2
FAAYWEXLAAA

SEQ ID NO: 929 - protein, 10 aa, Artificial Sequence
  Description of Artificial Sequence: Synthetic peptide
  N-term Ac
  MOD_RES (2)..(2): Alpha-Me R8-octenyl-alanine olefin amino acid connected by an all-carbon crosslinker comprising one double bond
  misc_feature (2)..(9): Crosslink between residues
  MOD_RES (7)..(7): Ac3c
  MOD_RES (9)..(9): Alpha-Me S5-pentenyl-alanine olefin amino acid connected by an all-carbon crosslinker comprising one double bond
  MOD_RES (10)..(10): Abu
  C-term NH2
FAAYWEXLAX

SEQ ID NO: 930 - protein, 10 aa, Artificial Sequence
  Description of Artificial Sequence: Synthetic peptide
  N-term Ac
  MOD_RES (2)..(2): Alpha-Me R8-octenyl-alanine olefin amino acid connected by an all-carbon crosslinker comprising one double bond
  misc_feature (2)..(9): Crosslink between residues
  MOD_RES (7)..(7): Ac3c
  MOD_RES (9)..(9): Alpha-Me S5-pentenyl-alanine olefin amino acid connected by an all-carbon crosslinker comprising one double bond
  MOD_RES (10)..(10): Norleucine
  C-term NH2
FAAYWEXLAL

SEQ ID NO: 931 - protein, 10 aa, Artificial Sequence
  Description of Artificial Sequence: Synthetic peptide
  N-term Ac
  MOD_RES (2)..(2): Alpha-Me R5-pentenyl-alanine olefin amino acid connected by an all-carbon crosslinker comprising one double bond
  misc_feature (2)..(9): Crosslink between residues
  MOD_RES (7)..(7): Ac3c
  MOD_RES (9)..(9): Alpha-Me S8-octenyl-alanine olefin amino acid connected by an all-carbon crosslinker comprising one double bond
  C-term NH2
FAAYWEXLAA

SEQ ID NO: 932 - protein, 10 aa, Artificial Sequence
  Description of Artificial Sequence: Synthetic peptide
  N-term Ac
  MOD_RES (2)..(2): Alpha-Me S5-pentenyl-alanine olefin amino acid connected by an all-carbon crosslinker comprising one double bond
  misc_feature (2)..(9): Crosslink between residues
  MOD_RES (7)..(7): Ac3c
  MOD_RES (9)..(9): Alpha-Me R8-octenyl-alanine olefin amino acid connected by an all-carbon crosslinker comprising one double bond
  C-term NH2
FAAYWEXLAA

SEQ ID NO: 933 - protein, 10 aa, Artificial Sequence
  Description of Artificial Sequence: Synthetic peptide
  N-term Ac
  MOD_RES (2)..(2): Alpha-Me R8-octenyl-alanine olefin amino acid connected by an all-carbon crosslinker comprising one double bond
  misc_feature (2)..(9): Crosslink between residues
  MOD_RES (7)..(7): Ac3c
  MOD_RES (9)..(9): Alpha-Me S5-pentenyl-alanine olefin amino acid connected by an all-carbon crosslinker comprising one double bond
  C-term NH2
FAAYWEXIAA

SEQ ID NO: 934 - protein, 10 aa, Artificial Sequence
  Description of Artificial Sequence: Synthetic peptide
  N-term Ac
  MOD_RES (2)..(2): Alpha-Me R8-octenyl-alanine olefin amino acid connected by an all-carbon crosslinker comprising one double bond
  misc_feature (2)..(9): Crosslink between residues
  MOD_RES (7)..(7): Ac3c
  MOD_RES (8)..(8): Norleucine
  MOD_RES (9)..(9): Alpha-Me S5-pentenyl-alanine olefin amino acid connected by an all-carbon crosslinker comprising one double bond
  C-term NH2
FAAYWEXLAA

SEQ ID NO: 935 - protein, 10 aa, Artificial Sequence
  Description of Artificial Sequence: Synthetic peptide
  N-term Ac
  MOD_RES (2)..(2): Alpha-Me R8-octenyl-alanine olefin amino acid connected by an all-carbon crosslinker comprising one double bond
  misc_feature (2)..(9): Crosslink between residues
  MOD_RES (7)..(7): Alpha-Me-Leu
  MOD_RES (9)..(9): Alpha-Me S5-pentenyl-alanine olefin amino acid connected by an all-carbon crosslinker comprising one double bond
  C-term NH2
FAAYWELLAA

SEQ ID NO: 936 - protein, 10 aa, Artificial Sequence
  Description of Artificial Sequence: Synthetic peptide
  N-term Ac
  MOD_RES (2)..(2): Alpha-Me R8-octenyl-alanine olefin amino acid connected by an all-carbon crosslinker comprising one double bond
  misc_feature (2)..(9): Crosslink between residues
  MOD_RES (7)..(7): Norleucine
  MOD_RES (9)..(9): Alpha-Me S5-pentenyl-alanine olefin amino acid connected by an all-carbon crosslinker comprising one double bond
  C-term NH2
FAAYWELLAA

SEQ ID NO: 937 - protein, 10 aa, Artificial Sequence
  Description of Artificial Sequence: Synthetic peptide
  N-term Ac
  MOD_RES (2)..(2): Alpha-Me R8-octenyl-alanine olefin amino acid connected by an all-carbon crosslinker comprising one double bond
  misc_feature (2)..(9): Crosslink between residues
  MOD_RES (7)..(7): Ac3c
  MOD_RES (9)..(9): Alpha-Me S5-pentenyl-alanine olefin amino acid connected by an all-carbon crosslinker comprising one double bond
  C-term NH2
FAAYWQXLAA

SEQ ID NO: 938 - protein, 10 aa, Artificial Sequence
  Description of Artificial Sequence: Synthetic peptide
  N-term Ac
  MOD_RES (2)..(2): Alpha-Me R8-octenyl-alanine olefin amino acid connected by an all-carbon crosslinker comprising one double bond
  misc_feature (2)..(9): Crosslink between residues
  MOD_RES (7)..(7): Ac3c
  MOD_RES (9)..(9): Alpha-Me S5-pentenyl-alanine olefin amino acid connected by an all-carbon crosslinker comprising one double bond
  C-term NH2
FAAYWAXLAA

SEQ ID NO: 939 - protein, 10 aa, Artificial Sequence
  Description of Artificial Sequence: Synthetic peptide
  N-term Ac
  MOD_RES (2)..(2): Alpha-Me R8-octenyl-alanine olefin amino acid connected by an all-carbon crosslinker comprising one double bond
  misc_feature (2)..(9): Crosslink between residues
  MOD_RES (6)..(6): Abu
  MOD_RES (7)..(7): Ac3c
  MOD_RES (9)..(9): Alpha-Me S5-pentenyl-alanine olefin amino acid connected by an all-carbon crosslinker comprising one double bond
  C-term NH2
FAAYWXXLAA

SEQ ID NO: 940 - protein, 10 aa, Artificial Sequence
  Description of Artificial Sequence: Synthetic peptide
  N-term Ac
  MOD_RES (2)..(2): Alpha-Me R8-octenyl-alanine olefin amino acid connected by an all-carbon crosslinker comprising one double bond
  misc_feature (2)..(9): Crosslink between residues
  MOD_RES (6)..(6): Norleucine
  MOD_RES (7)..(7): Ac3c
  MOD_RES (9)..(9): Alpha-Me S5-pentenyl-alanine olefin amino acid connected by an all-carbon crosslinker comprising one double bond
  C-term NH2
FAAYWLXLAA

SEQ ID NO: 941 - protein, 10 aa, Artificial Sequence
  Description of Artificial Sequence: Synthetic peptide
  N-term Ac
  MOD_RES (2)..(2): Alpha-Me R8-octenyl-alanine olefin amino acid connected by an all-carbon crosslinker comprising one double bond
  misc_feature (2)..(9): Crosslink between residues
  MOD_RES (3)..(3): Abu
  MOD_RES (7)..(7): Ac3c
  MOD_RES (9)..(9): Alpha-Me S5-pentenyl-alanine olefin amino acid connected by an all-carbon crosslinker comprising one double bond
  C-term NH2
FAXYWEXLAA

SEQ ID NO: 942 - protein, 10 aa, Artificial Sequence
  Description of Artificial Sequence: Synthetic peptide
  N-term Ac
  MOD_RES (2)..(2): Alpha-Me R8-octenyl-alanine olefin amino acid connected by an all-carbon crosslinker comprising one double bond
  misc_feature (2)..(9): Crosslink between residues
  MOD_RES (3)..(3): Norleucine
  MOD_RES (7)..(7): Ac3c
  MOD_RES (9)..(9): Alpha-Me S5-pentenyl-alanine olefin amino acid connected by an all-carbon crosslinker comprising one double bond
  C-term NH2
FALYWEXLAA

SEQ ID NO: 943 - protein, 13 aa, Artificial Sequence
  Description of Artificial Sequence: Synthetic peptide
  N-term 5-FAM
  MOD_RES (1)..(1): Beta-Ala
  C-term NH2
ALTFEHYWAQLTS

SEQ ID NO: 944 - protein, 13 aa, Artificial Sequence
  Description of Artificial Sequence: Synthetic peptide
  N-term 5-FAM
  MOD_RES (1)..(1): Beta-Ala
  MOD_RES (5)..(5): Alpha-Me R8-octenyl-alanine olefin amino acid connected by an all-carbon crosslinker comprising no double bonds
  misc_feature (5)..(12): Crosslink between residues
  MOD_RES (12)..(12): Alpha-Me S5-pentenyl-alanine olefin amino acid connected by an all-carbon crosslinker comprising no double bonds
  C-term NH2
ALTFAHYWAQLAS

SEQ ID NO: 945 - protein, 12 aa, Artificial Sequence
  Description of Artificial Sequence: Synthetic peptide
  N-term Ac
  MOD_RES (4)..(4): Alpha-Me R8-octenyl-alanine olefin amino acid connected by an all-carbon crosslinker comprising one double bond
  misc_feature (4)..(11): Crosslink between residues
  MOD_RES (10)..(10): hLeu
  MOD_RES (11)..(11): Alpha-Me S5-pentenyl-alanine olefin amino acid connected by an all-carbon crosslinker comprising one double bond
  C-term NH2
LTFAHYWAQLAS

SEQ ID NO: 946 - protein, 12 aa, Artificial Sequence
  Description of Artificial Sequence: Synthetic peptide
  N-term Ac
  MOD_RES (4)..(4): Alpha-Me R8-octenyl-alanine olefin amino acid connected by an all-carbon crosslinker comprising one double bond
  misc_feature (4)..(11): Crosslink between residues
  MOD_RES (10)..(10): Tert-butyl-Gly
  MOD_RES (11)..(11): Alpha-Me S5-pentenyl-alanine olefin amino acid connected by an all-carbon crosslinker comprising one double bond
  C-term NH2
LTFAHYWAQGAS

SEQ ID NO: 947 - protein, 12 aa, Artificial Sequence
  Description of Artificial Sequence: Synthetic peptide
  N-term Ac
  MOD_RES (4)..(4): Alpha-Me R8-octenyl-alanine olefin amino acid connected by an all-carbon crosslinker comprising one double bond
  misc_feature (4)..(11): Crosslink between residues
  MOD_RES (10)..(10): Adamantyl-Gly
  MOD_RES (11)..(11): Alpha-Me S5-pentenyl-alanine olefin amino acid connected by an all-carbon crosslinker comprising one double bond
  C-term NH2
LTFAHYWAQGAS

SEQ ID NO: 948 - protein, 12 aa, Artificial Sequence
  Description of Artificial Sequence: Synthetic peptide
  N-term Ac
  MOD_RES (4)..(4): Alpha-Me R8-octenyl-alanine olefin amino acid connected by an all-carbon crosslinker comprising one double bond
  misc_feature (4)..(11): Crosslink between residues
  MOD_RES (10)..(10): homo-cyclohexyl-Ala
  MOD_RES (11)..(11): Alpha-Me S5-pentenyl-alanine olefin amino acid connected by an all-carbon crosslinker comprising one double bond
  C-term NH2
LTFAHYWAQAAS

SEQ ID NO: 949 - protein, 12 aa, Artificial Sequence
  Description of Artificial Sequence: Synthetic peptide
  N-term Ac
  MOD_RES (4)..(4): Alpha-Me R8-octenyl-alanine olefin amino acid connected by an all-carbon crosslinker comprising one double bond
  misc_feature (4)..(11): Crosslink between residues
  MOD_RES (10)..(10): Cyclohexyl-Ala
  MOD_RES (11)..(11): Alpha-Me S5-pentenyl-alanine olefin amino acid connected by an all-carbon crosslinker comprising one double bond
  C-term NH2
LTFAHYWAQAAS

SEQ ID NO: 950 - protein, 12 aa, Artificial Sequence
  Description of Artificial Sequence: Synthetic peptide
  N-term Ac
  MOD_RES (4)..(4): Alpha-Me R8-octenyl-alanine olefin amino acid connected by an all-carbon crosslinker comprising one double bond
  misc_feature (4)..(11): Crosslink between residues
  MOD_RES (8)..(8): Ac6c
  MOD_RES (11)..(11): Alpha-Me S5-pentenyl-alanine olefin amino acid connected by an all-carbon crosslinker comprising one double bond
  C-term NH2
LTFAHYWXQLAS

SEQ ID NO: 951 - protein, 12 aa, Artificial Sequence
  Description of Artificial Sequence: Synthetic peptide
  N-term Ac
  MOD_RES (4)..(4): Alpha-Me R8-octenyl-alanine olefin amino acid connected by an all-carbon crosslinker comprising one double bond
  misc_feature (4)..(11): Crosslink between residues
  MOD_RES (8)..(8): Ac5c
  MOD_RES (11)..(11): Alpha-Me S5-pentenyl-alanine olefin amino acid connected by an all-carbon crosslinker comprising one double bond
  C-term NH2
LTFAHYWXQLAS

SEQ ID NO: 952 - protein, 12 aa, Artificial Sequence
  Description of Artificial Sequence: Synthetic peptide
  N-term Ac
  MOD_RES (3)..(3): homo-Phe
  MOD_RES (4)..(4): Alpha-Me R8-octenyl-alanine olefin amino acid connected by an all-carbon crosslinker comprising one double bond
  misc_feature (4)..(11): Crosslink between residues
  MOD_RES (11)..(11): Alpha-Me S5-pentenyl-alanine olefin amino acid connected by an all-carbon crosslinker comprising one double bond
  C-term NH2
LTFAHYWAQLAS

SEQ ID NO: 953 - protein, 12 aa, Artificial Sequence
  Description of Artificial Sequence: Synthetic peptide
  N-term Ac
  MOD_RES (3)..(3): Indanyl-Gly
  MOD_RES (4)..(4): Alpha-Me R8-octenyl-alanine olefin amino acid connected by an all-carbon crosslinker comprising one double bond
  misc_feature (4)..(11): Crosslink between residues
  MOD_RES (11)..(11): Alpha-Me S5-pentenyl-alanine olefin amino acid connected by an all-carbon crosslinker comprising one double bond
  C-term NH2
LTGAHYWAQLAS

SEQ ID NO: 954 - protein, 12 aa, Artificial Sequence
  Description of Artificial Sequence: Synthetic peptide
  N-term Ac
  MOD_RES (4)..(4): Alpha-Me R8-octenyl-alanine olefin amino acid connected by an all-carbon crosslinker comprising one double bond
  misc_feature (4)..(11): Crosslink between residues
  MOD_RES (10)..(10): Cyclohexyl-Gly
  MOD_RES (11)..(11): Alpha-Me S5-pentenyl-alanine olefin amino acid connected by an all-carbon crosslinker comprising one double bond
  C-term NH2
LTFAHYWAQGAS

SEQ ID NO: 955 - protein, 12 aa, Artificial Sequence
  Description of Artificial Sequence: Synthetic peptide
  N-term Ac
  MOD_RES (4)..(4): Alpha-Me R8-octenyl-alanine olefin amino acid connected by an all-carbon crosslinker comprising one double bond
  misc_feature (4)..(11): Crosslink between residues
  MOD_RES (11)..(11): Alpha-Me S5-pentenyl-alanine olefin amino acid connected by an all-carbon crosslinker comprising one double bond
  C-term NH2
LTFAHYWAQFAS

SEQ ID NO: 956 - protein, 12 aa, Artificial Sequence
  Description of Artificial Sequence: Synthetic peptide
  N-term Ac
  MOD_RES (4)..(4): Alpha-Me R8-octenyl-alanine olefin amino acid connected by an all-carbon crosslinker comprising one double bond
  misc_feature (4)..(11): Crosslink between residues
  MOD_RES (10)..(10): Indanyl-Gly
  MOD_RES (11)..(11): Alpha-Me S5-pentenyl-alanine olefin amino acid connected by an all-carbon crosslinker comprising one double bond
  C-term NH2
LTFAHYWAQGAS

SEQ ID NO: 957 - protein, 12 aa, Artificial Sequence
  Description of Artificial Sequence: Synthetic peptide
  N-term Ac
  MOD_RES (4)..(4): Alpha-Me R8-octenyl-alanine olefin amino acid connected by an all-carbon crosslinker comprising one double bond
  misc_feature (4)..(11): Crosslink between residues
  MOD_RES (10)..(10): Cyclobutyl-Ala
  MOD_RES (11)..(11): Alpha-Me S5-pentenyl-alanine olefin amino acid connected by an all-carbon crosslinker comprising one double bond
  C-term NH2
LTFAHYWAQAAS

SEQ ID NO: 958 - protein, 12 aa, Artificial Sequence
  Description of Artificial Sequence: Synthetic peptide
  N-term Ac
  MOD_RES (4)..(4): Alpha-Me R8-octenyl-alanine olefin amino acid connected by an all-carbon crosslinker comprising one double bond
  misc_feature (4)..(11): Crosslink between residues
  MOD_RES (10)..(10): Cyclopentyl-Gly
  MOD_RES (11)..(11): Alpha-Me S5-pentenyl-alanine olefin amino acid connected by an all-carbon crosslinker comprising one double bond
  C-term NH2
LTFAHYWAQGAS

SEQ ID NO: 959 - protein, 12 aa, Artificial Sequence
  Description of Artificial Sequence: Synthetic peptide
  N-term Ac
  MOD_RES (4)..(4): Alpha-Me R8-octenyl-alanine olefin amino acid connected by an all-carbon crosslinker comprising one double bond
  misc_feature (4)..(11): Crosslink between residues
  MOD_RES (6)..(6): hY
  MOD_RES (11)..(11): Alpha-Me S5-pentenyl-alanine olefin amino acid connected by an all-carbon crosslinker comprising one double bond
  C-term NH2
LTFAHYWAQLAS

SEQ ID NO: 960 - protein, 10 aa, Artificial Sequence
  Description of Artificial Sequence: Synthetic peptide
  N-term Ac
  MOD_RES (2)..(2): Alpha-Me R8-octenyl-alanine olefin amino acid connected by an all-carbon crosslinker comprising one double bond
  misc_feature (2)..(9): Crosslink between residues
  MOD_RES (7)..(7): Ac3c
  MOD_RES (8)..(8): hLeu
  MOD_RES (9)..(9): Alpha-Me S5-pentenyl-alanine olefin amino acid connected by an all-carbon crosslinker comprising one double bond
  C-term NH2
FAAYWEXLAA

SEQ ID NO: 961 - protein, 10 aa, Artificial Sequence
  Description of Artificial Sequence: Synthetic peptide
  N-term Ac
  MOD_RES (2)..(2): Alpha-Me R8-octenyl-alanine olefin amino acid connected by an all-carbon crosslinker comprising one double bond
  misc_feature (2)..(9): Crosslink between residues
  MOD_RES (7)..(7): Ac3c
  MOD_RES (8)..(8): Tert-butyl-Gly
  MOD_RES (9)..(9): Alpha-Me S5-pentenyl-alanine olefin amino acid connected by an all-carbon crosslinker comprising one double bond
  C-term NH2
FAAYWEXGAA

SEQ ID NO: 962 - protein, 10 aa, Artificial Sequence
  Description of Artificial Sequence: Synthetic peptide
  N-term Ac
  MOD_RES (2)..(2): Alpha-Me R8-octenyl-alanine olefin amino acid connected by an all-carbon crosslinker comprising one double bond
  misc_feature (2)..(9): Crosslink between residues
  MOD_RES (7)..(7): Ac3c
  MOD_RES (8)..(8): Adamantyl-Gly
  MOD_RES (9)..(9): Alpha-Me S5-pentenyl-alanine olefin amino acid connected by an all-carbon crosslinker comprising one double bond
  C-term NH2
FAAYWEXGAA

SEQ ID NO: 963 - protein, 10 aa, Artificial Sequence
  Description of Artificial Sequence: Synthetic peptide
  N-term Ac
  MOD_RES (2)..(2): Alpha-Me R8-octenyl-alanine olefin amino acid connected by an all-carbon crosslinker comprising one double bond
  misc_feature (2)..(9): Crosslink between residues
  MOD_RES (7)..(7): Ac3c
  MOD_RES (8)..(8): homo-cyclohexyl-Ala
  MOD_RES (9)..(9): Alpha-Me S5-pentenyl-alanine olefin amino acid connected by an all-carbon crosslinker comprising one double bond
  C-term NH2
FAAYWEXAAA

SEQ ID NO: 964 - protein, 10 aa, Artificial Sequence
  Description of Artificial Sequence: Synthetic peptide
  N-term Ac
  MOD_RES (2)..(2): Alpha-Me R8-octenyl-alanine olefin amino acid connected by an all-carbon crosslinker comprising one double bond
  misc_feature (2)..(9): Crosslink between residues
  MOD_RES (7)..(7): Ac3c
  MOD_RES (8)..(8): Cyclohexyl-Ala
  MOD_RES (9)..(9): Alpha-Me S5-pentenyl-alanine olefin amino acid connected by an all-carbon crosslinker comprising one double bond
  C-term NH2
FAAYWEXAAA

SEQ ID NO: 965 - protein, 10 aa, Artificial Sequence
  Description of Artificial Sequence: Synthetic peptide
  N-term Ac
  MOD_RES (2)..(2): Alpha-Me R8-octenyl-alanine olefin amino acid connected by an all-carbon crosslinker comprising one double bond
  misc_feature (2)..(9): Crosslink between residues
  MOD_RES (7)..(7): Ac6c
  MOD_RES (9)..(9): Alpha-Me S5-pentenyl-alanine olefin amino acid connected by an all-carbon crosslinker comprising one double bond
  C-term NH2
FAAYWEXLAA

SEQ ID NO: 966 - protein, 10 aa, Artificial Sequence
  Description of Artificial Sequence: Synthetic peptide
  N-term Ac
  MOD_RES (2)..(2): Alpha-Me R8-octenyl-alanine olefin amino acid connected by an all-carbon crosslinker comprising one double bond
  misc_feature (2)..(9): Crosslink between residues
  MOD_RES (7)..(7): Ac5c
  MOD_RES (9)..(9): Alpha-Me S5-pentenyl-alanine olefin amino acid connected by an all-carbon crosslinker comprising one double bond
  C-term NH2
FAAYWEXLAA

SEQ ID NO: 967 - protein, 10 aa, Artificial Sequence
  Description of Artificial Sequence: Synthetic peptide
  N-term Ac
  MOD_RES (1)..(1): homo-Phe
  MOD_RES (2)..(2): Alpha-Me R8-octenyl-alanine olefin amino acid connected by an all-carbon crosslinker comprising one double bond
  misc_feature (2)..(9): Crosslink between residues
  MOD_RES (7)..(7): Ac3c
  MOD_RES (9)..(9): Alpha-Me S5-pentenyl-alanine olefin amino acid connected by an all-carbon crosslinker comprising one double bond
  C-term NH2
FAAYWEXLAA

SEQ ID NO: 968 - protein, 10 aa, Artificial Sequence
  Description of Artificial Sequence: Synthetic peptide
  N-term Ac
  MOD_RES (1)..(1): Indanyl-Gly
  MOD_RES (2)..(2): Alpha-Me R8-octenyl-alanine olefin amino acid connected by an all-carbon crosslinker comprising one double bond
  misc_feature (2)..(9): Crosslink between residues
  MOD_RES (7)..(7): Ac3c
  MOD_RES (9)..(9): Alpha-Me S5-pentenyl-alanine olefin amino acid connected by an all-carbon crosslinker comprising one double bond
  C-term NH2
GAAYWEXLAA

SEQ ID NO: 969 - protein, 10 aa, Artificial Sequence
  Description of Artificial Sequence: Synthetic peptide
  N-term Ac
  MOD_RES (2)..(2): Alpha-Me R8-octenyl-alanine olefin amino acid connected by an all-carbon crosslinker comprising one double bond
  misc_feature (2)..(9): Crosslink between residues
  MOD_RES (7)..(7): Ac3c
  MOD_RES (9)..(9): Alpha-Me S5-pentenyl-alanine olefin amino acid connected by an all-carbon crosslinker comprising one double bond
  C-term NH2
FAAYWEXFAA

SEQ ID NO: 970 - protein, 10 aa, Artificial Sequence
  Description of Artificial Sequence: Synthetic peptide
  N-term Ac
  MOD_RES (2)..(2): Alpha-Me R8-octenyl-alanine olefin amino acid connected by an all-carbon crosslinker comprising one double bond
  misc_feature (2)..(9): Crosslink between residues
  MOD_RES (7)..(7): Ac3c
  MOD_RES (8)..(8): Indanyl-Gly
  MOD_RES (9)..(9): Alpha-Me S5-pentenyl-alanine olefin amino acid connected by an all-carbon crosslinker comprising one double bond
  C-term NH2
FAAYWEXGAA

SEQ ID NO: 971 - protein, 10 aa, Artificial Sequence
  Description of Artificial Sequence: Synthetic peptide
  N-term Ac
  MOD_RES (2)..(2): Alpha-Me R8-octenyl-alanine olefin amino acid connected by an all-carbon crosslinker comprising one double bond
  misc_feature (2)..(9): Crosslink between residues
  MOD_RES (7)..(7): Ac3c
  MOD_RES (8)..(8): Cyclobutyl-Ala
  MOD_RES (9)..(9): Alpha-Me S5-pentenyl-alanine olefin amino acid connected by an all-carbon crosslinker comprising one double bond
  C-term NH2
FAAYWEXAAA

SEQ ID NO: 972 - protein, 10 aa, Artificial Sequence
  Description of Artificial Sequence: Synthetic peptide
  N-term Ac
  MOD_RES (2)..(2): Alpha-Me R8-octenyl-alanine olefin amino acid connected by an all-carbon crosslinker comprising one double bond
  misc_feature (2)..(9): Crosslink between residues
  MOD_RES (7)..(7): Ac3c
  MOD_RES (8)..(8): Cyclopentyl-Gly
  MOD_RES (9)..(9): Alpha-Me S5-pentenyl-alanine olefin amino acid connected by an all-carbon crosslinker comprising one double bond
  C-term NH2
FAAYWEXGAA

SEQ ID NO: 973 - protein, 10 aa, Artificial Sequence
  Description of Artificial Sequence: Synthetic peptide
  N-term Ac
  MOD_RES (2)..(2): Alpha-Me R8-octenyl-alanine olefin amino acid connected by an all-carbon crosslinker comprising one double bond
  misc_feature (2)..(9): Crosslink between residues
  MOD_RES (4)..(4): hY
  MOD_RES (7)..(7): Ac3c
  MOD_RES (9)..(9): Alpha-Me S5-pentenyl-alanine olefin amino acid connected by an all-carbon crosslinker comprising one double bond
  C-term NH2
FAAYWEXLAA

SEQ ID NO: 974 - protein, 10 aa, Artificial Sequence
  Description of Artificial Sequence: Synthetic peptide
  N-term Ac
  MOD_RES (2)..(2): Alpha-Me R8-octenyl-alanine olefin amino acid connected by an all-carbon crosslinker comprising one double bond
  misc_feature (2)..(9): Crosslink between residues
  MOD_RES (7)..(7): Ac3c
  MOD_RES (9)..(9): Alpha-Me S5-pentenyl-alanine olefin amino acid connected by an all-carbon crosslinker comprising one double bond
  C-term NH2
FAAYWEXLAQ

SEQ ID NO: 975 - protein, 10 aa, Artificial Sequence
  Description of Artificial Sequence: Synthetic peptide
  N-term Ac
  MOD_RES (2)..(2): Alpha-Me R8-octenyl-alanine olefin amino acid connected by an all-carbon crosslinker comprising one double bond
  misc_feature (2)..(9): Crosslink between residues
  MOD_RES (7)..(7): 2-aminoisobutyric acid
  MOD_RES (9)..(9): Alpha-Me S5-pentenyl-alanine olefin amino acid connected by an all-carbon crosslinker comprising one double bond
  C-term NH2
FAAYWEXLAA

SEQ ID NO: 976 - protein, 10 aa, Artificial Sequence
  Description of Artificial Sequence: Synthetic peptide
  N-term Ac
  MOD_RES (2)..(2): Alpha-Me R8-octenyl-alanine olefin amino acid connected by an all-carbon crosslinker comprising one double bond
  misc_feature (2)..(9): Crosslink between residues
  MOD_RES (9)..(9): Alpha-Me S5-pentenyl-alanine olefin amino acid connected by an all-carbon crosslinker comprising one double bond
  C-term NH2
FAAYWEALAA

SEQ ID NO: 977 - protein, 12 aa, Artificial Sequence
  Description of Artificial Sequence: Synthetic peptide
  N-term Ac
  MOD_RES (4)..(4): Alpha-Me R8-octenyl-alanine olefin amino acid connected by an all-carbon crosslinker comprising one double bond
  misc_feature (4)..(11): Crosslink between residues
  MOD_RES (11)..(11): Alpha-Me S5-pentenyl-alanine olefin amino acid connected by an all-carbon crosslinker comprising one double bond
  C-term NH2
LAFAAYWAALAA

SEQ ID NO: 978 - protein, 12 aa, Artificial Sequence
  Description of Artificial Sequence: Synthetic peptide
  N-term Ac
  MOD_RES (4)..(4): Alpha-Me R8-octenyl-alanine olefin amino acid connected by an all-carbon crosslinker comprising one double bond
  misc_feature (4)..(11): Crosslink between residues
  MOD_RES (9)..(9): Ac3c
  MOD_RES (11)..(11): Alpha-Me S5-pentenyl-alanine olefin amino acid connected by an all-carbon crosslinker comprising one double bond
  C-term NH2
LTFAHYWAXLAS

SEQ ID NO: 979 - protein, 12 aa, Artificial Sequence
  Description of Artificial Sequence: Synthetic peptide
  N-term Ac
  MOD_RES (1)..(1): Norleucine
  MOD_RES (4)..(4): Alpha-Me R8-octenyl-alanine olefin amino acid connected by an all-carbon crosslinker comprising one double bond
  misc_feature (4)..(11): Crosslink between residues
  MOD_RES (11)..(11): Alpha-Me S5-pentenyl-alanine olefin amino acid connected by an all-carbon crosslinker comprising one double bond
  C-term NH2
LTFAHYWAQLAS

SEQ ID NO: 980 - protein, 12 aa, Artificial Sequence
  Description of Artificial Sequence: Synthetic peptide
  N-term Ac
  MOD_RES (4)..(4): Alpha-Me R8-octenyl-alanine olefin amino acid connected by an all-carbon crosslinker comprising one double bond
  misc_feature (4)..(11): Crosslink between residues
  MOD_RES (11)..(11): Alpha-Me S5-pentenyl-alanine olefin amino acid connected by an all-carbon crosslinker comprising one double bond
  C-term NH2
VTFAHYWAQLAS

SEQ ID NO: 981 - protein, 12 aa, Artificial Sequence
  Description of Artificial Sequence: Synthetic peptide
  N-term Ac
  MOD_RES (4)..(4): Alpha-Me R8-octenyl-alanine olefin amino acid connected by an all-carbon crosslinker comprising one double bond
  misc_feature (4)..(11): Crosslink between residues
  MOD_RES (11)..(11): Alpha-Me S5-pentenyl-alanine olefin amino acid connected by an all-carbon crosslinker comprising one double bond
  C-term NH2
FTFAHYWAQLAS

SEQ ID NO: 982 - protein, 12 aa, Artificial Sequence
  Description of Artificial Sequence: Synthetic peptide
  N-term Ac
  MOD_RES (4)..(4): Alpha-Me R8-octenyl-alanine olefin amino acid connected by an all-carbon crosslinker comprising one double bond
  misc_feature (4)..(11): Crosslink between residues
  MOD_RES (11)..(11): Alpha-Me S5-pentenyl-alanine olefin amino acid connected by an all-carbon crosslinker comprising one double bond
  C-term NH2
WTFAHYWAQLAS

SEQ ID NO: 983 - protein, 12 aa, Artificial Sequence
  Description of Artificial Sequence: Synthetic peptide
  N-term Ac
  MOD_RES (4)..(4): Alpha-Me R8-octenyl-alanine olefin amino acid connected by an all-carbon crosslinker comprising one double bond
  misc_feature (4)..(11): Crosslink between residues
  MOD_RES (11)..(11): Alpha-Me S5-pentenyl-alanine olefin amino acid connected by an all-carbon crosslinker comprising one double bond
  C-term NH2
RTFAHYWAQLAS

SEQ ID NO: 984 - protein, 12 aa, Artificial Sequence
  Description of Artificial Sequence: Synthetic peptide
  N-term Ac
  MOD_RES (4)..(4): Alpha-Me R8-octenyl-alanine olefin amino acid connected by an all-carbon crosslinker comprising one double bond
  misc_feature (4)..(11): Crosslink between residues
  MOD_RES (11)..(11): Alpha-Me S5-pentenyl-alanine olefin amino acid connected by an all-carbon crosslinker comprising one double bond
  C-term NH2
KTFAHYWAQLAS

SEQ ID NO: 985 - protein, 12 aa, Artificial Sequence
  Description of Artificial Sequence: Synthetic peptide
  N-term Ac
  MOD_RES (2)..(2): Norleucine
  MOD_RES (4)..(4): Alpha-Me R8-octenyl-alanine olefin amino acid connected by an all-carbon crosslinker comprising one double bond
  misc_feature (4)..(11): Crosslink between residues
  MOD_RES (11)..(11): Alpha-Me S5-pentenyl-alanine olefin amino acid connected by an all-carbon crosslinker comprising one double bond
  C-term NH2
LLFAHYWAQLAS

SEQ ID NO: 986 - protein, 12 aa, Artificial Sequence
  Description of Artificial Sequence: Synthetic peptide
  N-term Ac
  MOD_RES (4)..(4): Alpha-Me R8-octenyl-alanine olefin amino acid connected by an all-carbon crosslinker comprising one double bond
  misc_feature (4)..(11): Crosslink between residues
  MOD_RES (11)..(11): Alpha-Me S5-pentenyl-alanine olefin amino acid connected by an all-carbon crosslinker comprising one double bond
  C-term NH2
LVFAHYWAQLAS

SEQ ID NO: 987 - protein, 12 aa, Artificial Sequence
  Description of Artificial Sequence: Synthetic peptide
  N-term Ac
  MOD_RES (4)..(4): Alpha-Me R8-octenyl-alanine olefin amino acid connected by an all-carbon crosslinker comprising one double bond
  misc_feature (4)..(11): Crosslink between residues
  MOD_RES (11)..(11): Alpha-Me S5-pentenyl-alanine olefin amino acid connected by an all-carbon crosslinker comprising one double bond
  C-term NH2
LFFAHYWAQLAS

SEQ ID NO: 988 - protein, 12 aa, Artificial Sequence
  Description of Artificial Sequence: Synthetic peptide
  N-term Ac
  MOD_RES (4)..(4): Alpha-Me R8-octenyl-alanine olefin amino acid connected by an all-carbon crosslinker comprising one double bond
  misc_feature (4)..(11): Crosslink between residues
  MOD_RES (11)..(11): Alpha-Me S5-pentenyl-alanine olefin amino acid connected by an all-carbon crosslinker comprising one double bond
  C-term NH2
LWFAHYWAQLAS

SEQ ID NO: 989 - protein, 12 aa, Artificial Sequence
  Description of Artificial Sequence: Synthetic peptide
  N-term Ac
  MOD_RES (4)..(4): Alpha-Me R8-octenyl-alanine olefin amino acid connected by an all-carbon crosslinker comprising one double bond
  misc_feature (4)..(11): Crosslink between residues
  MOD_RES (11)..(11): Alpha-Me S5-pentenyl-alanine olefin amino acid connected by an all-carbon crosslinker comprising one double bond
  C-term NH2
LRFAHYWAQLAS

SEQ ID NO: 990 - protein, 12 aa, Artificial Sequence
  Description of Artificial Sequence: Synthetic peptide
  N-term Ac
  MOD_RES (4)..(4): Alpha-Me R8-octenyl-alanine olefin amino acid connected by an all-carbon crosslinker comprising one double bond
  misc_feature (4)..(11): Crosslink between residues
  MOD_RES (11)..(11): Alpha-Me S5-pentenyl-alanine olefin amino acid connected by an all-carbon crosslinker comprising one double bond
  C-term NH2
LKFAHYWAQLAS

SEQ ID NO: 991 - protein, 12 aa, Artificial Sequence
  Description of Artificial Sequence: Synthetic peptide
  N-term Ac
  MOD_RES (4)..(4): Alpha-Me R8-octenyl-alanine olefin amino acid connected by an all-carbon crosslinker comprising one double bond
  misc_feature (4)..(11): Crosslink between residues
  MOD_RES (5)..(5): Norleucine
  MOD_RES (11)..(11): Alpha-Me S5-pentenyl-alanine olefin amino acid connected by an all-carbon crosslinker comprising one double bond
  C-term NH2
LTFALYWAQLAS

SEQ ID NO: 992 - protein, 12 aa, Artificial Sequence
  Description of Artificial Sequence: Synthetic peptide
  N-term Ac
  MOD_RES (4)..(4): Alpha-Me R8-octenyl-alanine olefin amino acid connected by an all-carbon crosslinker comprising one double bond
  misc_feature (4)..(11): Crosslink between residues
  MOD_RES (11)..(11): Alpha-Me S5-pentenyl-alanine olefin amino acid connected by an all-carbon crosslinker comprising one double bond
  C-term NH2
LTFAVYWAQLAS

SEQ ID NO: 993 - protein, 12 aa, Artificial Sequence
  Description of Artificial Sequence: Synthetic peptide
  N-term Ac
  MOD_RES (4)..(4): Alpha-Me R8-octenyl-alanine olefin amino acid connected by an all-carbon crosslinker comprising one double bond
  misc_feature (4)..(11): Crosslink between residues
  MOD_RES (11)..(11): Alpha-Me S5-pentenyl-alanine olefin amino acid connected by an all-carbon crosslinker comprising one double bond
  C-term NH2
LTFAFYWAQLAS

SEQ ID NO: 994 - protein, 12 aa, Artificial Sequence
  Description of Artificial Sequence: Synthetic peptide
  N-term Ac
  MOD_RES (4)..(4): Alpha-Me R8-octenyl-alanine olefin amino acid connected by an all-carbon crosslinker comprising one double bond
  misc_feature (4)..(11): Crosslink between residues
  MOD_RES (11)..(11): Alpha-Me S5-pentenyl-alanine olefin amino acid connected by an all-carbon crosslinker comprising one double bond
  C-term NH2
LTFAWYWAQLAS

SEQ ID NO: 995 - protein, 12 aa, Artificial Sequence
  Description of Artificial Sequence: Synthetic peptide
  N-term Ac
  MOD_RES (4)..(4): Alpha-Me R8-octenyl-alanine olefin amino acid connected by an all-carbon crosslinker comprising one double bond
  misc_feature (4)..(11): Crosslink between residues
  MOD_RES (11)..(11): Alpha-Me S5-pentenyl-alanine olefin amino acid connected by an all-carbon crosslinker comprising one double bond
  C-term NH2
LTFARYWAQLAS

SEQ ID NO: 996 - protein, 12 aa, Artificial Sequence
  Description of Artificial Sequence: Synthetic peptide
  N-term Ac
  MOD_RES (4)..(4): Alpha-Me R8-octenyl-alanine olefin amino acid connected by an all-carbon crosslinker comprising one double bond
  misc_feature (4)..(11): Crosslink between residues
  MOD_RES (11)..(11): Alpha-Me S5-pentenyl-alanine olefin amino acid connected by an all-carbon crosslinker comprising one double bond
  C-term NH2
LTFAKYWAQLAS

SEQ ID NO: 997 - protein, 12 aa, Artificial Sequence
  Description of Artificial Sequence: Synthetic peptide
  N-term Ac
  MOD_RES (4)..(4): Alpha-Me R8-octenyl-alanine olefin amino acid connected by an all-carbon crosslinker comprising one double bond
  misc_feature (4)..(11): Crosslink between residues
  MOD_RES (6)..(6): Norleucine
  MOD_RES (11)..(11): Alpha-Me S5-pentenyl-alanine olefin amino acid connected by an all-carbon crosslinker comprising one double bond
  C-term NH2
LTFAHLWAQLAS

SEQ ID NO: 998 - protein, 12 aa, Artificial Sequence
  Description of Artificial Sequence: Synthetic peptide
  N-term Ac
  MOD_RES (4)..(4): Alpha-Me R8-octenyl-alanine olefin amino acid connected by an all-carbon crosslinker comprising one double bond
  misc_feature (4)..(11): Crosslink between residues
  MOD_RES (11)..(11): Alpha-Me S5-pentenyl-alanine olefin amino acid connected by an all-carbon crosslinker comprising one double bond
  C-term NH2
LTFAHVWAQLAS

SEQ ID NO: 999 - protein, 12 aa, Artificial Sequence
  Description of Artificial Sequence: Synthetic peptide
  N-term Ac
  MOD_RES (4)..(4): Alpha-Me R8-octenyl-alanine olefin amino acid connected by an all-carbon crosslinker comprising one double bond
  misc_feature (4)..(11): Crosslink between residues
  MOD_RES (11)..(11): Alpha-Me S5-pentenyl-alanine olefin amino acid connected by an all-carbon crosslinker comprising one double bond
  C-term NH2
LTFAHFWAQLAS

SEQ ID NO: 1000 - protein, 12 aa, Artificial Sequence
  Description of Artificial Sequence: Synthetic peptide
  N-term Ac
  MOD_RES (4)..(4): Alpha-Me R8-octenyl-alanine olefin amino acid connected by an all-carbon crosslinker comprising one double bond
  misc_feature (4)..(11): Crosslink between residues
  MOD_RES (11)..(11): Alpha-Me S5-pentenyl-alanine olefin amino acid connected by an all-carbon crosslinker comprising one double bond
  C-term NH2
LTFAHWWAQLAS

SEQ ID NO: 1001 - protein, 12 aa, Artificial Sequence
  Description of Artificial Sequence: Synthetic peptide
  N-term Ac
  MOD_RES (4)..(4): Alpha-Me R8-octenyl-alanine olefin amino acid connected by an all-carbon crosslinker comprising one double bond
  misc_feature (4)..(11): Crosslink between residues
  MOD_RES (11)..(11): Alpha-Me S5-pentenyl-alanine olefin amino acid connected by an all-carbon crosslinker comprising one double bond
  C-term NH2
LTFAHRWAQLAS

SEQ ID NO: 1002 - protein, 12 aa, Artificial Sequence
  Description of Artificial Sequence: Synthetic peptide
  N-term Ac
  MOD_RES (4)..(4): Alpha-Me R8-octenyl-alanine olefin amino acid connected by an all-carbon crosslinker comprising one double bond
  misc_feature (4)..(11): Crosslink between residues
  MOD_RES (11)..(11): Alpha-Me S5-pentenyl-alanine olefin amino acid connected by an all-carbon crosslinker comprising one double bond
  C-term NH2
LTFAHKWAQLAS

SEQ ID NO: 1003 - protein, 12 aa, Artificial Sequence
  Description of Artificial Sequence: Synthetic peptide
  N-term Ac
  MOD_RES (4)..(4): Alpha-Me R8-octenyl-alanine olefin amino acid connected by an all-carbon crosslinker comprising one double bond
  misc_feature (4)..(11): Crosslink between residues
  MOD_RES (8)..(8): Norleucine
  MOD_RES (11)..(11): Alpha-Me S5-pentenyl-alanine olefin amino acid connected by an all-carbon crosslinker comprising one double bond
  C-term NH2
LTFAHYWLQLAS

SEQ ID NO: 1004 - protein, 12 aa, Artificial Sequence
  Description of Artificial Sequence: Synthetic peptide
  N-term Ac
  MOD_RES (4)..(4): Alpha-Me R8-octenyl-alanine olefin amino acid connected by an all-carbon crosslinker comprising one double bond
  misc_feature (4)..(11): Crosslink between residues
  MOD_RES (11)..(11): Alpha-Me S5-pentenyl-alanine olefin amino acid connected by an all-carbon crosslinker comprising one double bond
  C-term NH2
LTFAHYWVQLAS

SEQ ID NO: 1005 - protein, 12 aa, Artificial Sequence
  Description of Artificial Sequence: Synthetic peptide
  N-term Ac
  MOD_RES (4)..(4): Alpha-Me R8-octenyl-alanine olefin amino acid connected by an all-carbon crosslinker comprising one double bond
  misc_feature (4)..(11): Crosslink between residues
  MOD_RES (11)..(11): Alpha-Me S5-pentenyl-alanine olefin amino acid connected by an all-carbon crosslinker comprising one double bond
  C-term NH2
LTFAHYWFQLAS

SEQ ID NO: 1006 - protein, 12 aa, Artificial Sequence
  Description of Artificial Sequence: Synthetic peptide
  N-term Ac
  MOD_RES (4)..(4): Alpha-Me R8-octenyl-alanine olefin amino acid connected by an all-carbon crosslinker comprising one double bond
  misc_feature (4)..(11): Crosslink between residues
  MOD_RES (11)..(11): Alpha-Me S5-pentenyl-alanine olefin amino acid connected by an all-carbon crosslinker comprising one double bond
  C-term NH2
LTFAHYWWQLAS

SEQ ID NO: 1007 - protein, 12 aa, Artificial Sequence
  Description of Artificial Sequence: Synthetic peptide
  N-term Ac
  MOD_RES (4)..(4): Alpha-Me R8-octenyl-alanine olefin amino acid connected by an all-carbon crosslinker comprising one double bond
  misc_feature (4)..(11): Crosslink between residues
  MOD_RES (11)..(11): Alpha-Me S5-pentenyl-alanine olefin amino acid connected by an all-carbon crosslinker comprising one double bond
  C-term NH2
LTFAHYWKQLAS

SEQ ID NO: 1008 - protein, 12 aa, Artificial Sequence
  Description of Artificial Sequence: Synthetic peptide
  N-term Ac
  MOD_RES (4)..(4): Alpha-Me R8-octenyl-alanine olefin amino acid connected by an all-carbon crosslinker comprising one double bond
  misc_feature (4)..(11): Crosslink between residues
  MOD_RES (9)..(9): Norleucine
  MOD_RES (11)..(11): Alpha-Me S5-pentenyl-alanine olefin amino acid connected by an all-carbon crosslinker comprising one double bond
  C-term NH2
LTFAHYWALLAS

SEQ ID NO: 1009 - protein, 12 aa, Artificial Sequence
  Description of Artificial Sequence: Synthetic peptide
  N-term Ac
  MOD_RES (4)..(4): Alpha-Me R8-octenyl-alanine olefin amino acid connected by an all-carbon crosslinker comprising one double bond
  misc_feature (4)..(11): Crosslink between residues
  MOD_RES (11)..(11): Alpha-Me S5-pentenyl-alanine olefin amino acid connected by an all-carbon crosslinker comprising one double bond
  C-term NH2
LTFAHYWAVLAS

SEQ ID NO: 1010 - protein, 12 aa, Artificial Sequence
  Description of Artificial Sequence: Synthetic peptide
  N-term Ac
  MOD_RES (4)..(4): Alpha-Me R8-octenyl-alanine olefin amino acid connected by an all-carbon crosslinker comprising one double bond
  misc_feature (4)..(11): Crosslink between residues
  MOD_RES (11)..(11): Alpha-Me S5-pentenyl-alanine olefin amino acid connected by an all-carbon crosslinker comprising one double bond
  C-term NH2
LTFAHYWAFLAS

SEQ ID NO: 1011 - protein, 12 aa, Artificial Sequence
  Description of Artificial Sequence: Synthetic peptide
  N-term Ac
  MOD_RES (4)..(4): Alpha-Me R8-octenyl-alanine olefin amino acid connected by an all-carbon crosslinker comprising one double bond
  misc_feature (4)..(11): Crosslink between residues
  MOD_RES (11)..(11): Alpha-Me S5-pentenyl-alanine olefin amino acid connected by an all-carbon crosslinker comprising one double bond
  C-term NH2
LTFAHYWAWLAS

SEQ ID NO: 1012 - protein, 12 aa, Artificial Sequence
  Description of Artificial Sequence: Synthetic peptide
  N-term Ac
  MOD_RES (4)..(4): Alpha-Me R8-octenyl-alanine olefin amino acid connected by an all-carbon crosslinker comprising one double bond
  misc_feature (4)..(11): Crosslink between residues
  MOD_RES (11)..(11): Alpha-Me S5-pentenyl-alanine olefin amino acid connected by an all-carbon crosslinker comprising one double bond
  C-term NH2
LTFAHYWARLAS

SEQ ID NO: 1013 - protein, 12 aa, Artificial Sequence
  Description of Artificial Sequence: Synthetic peptide
  N-term Ac
  MOD_RES (4)..(4): Alpha-Me R8-octenyl-alanine olefin amino acid connected by an all-carbon crosslinker comprising one double bond
  misc_feature (4)..(11): Crosslink between residues
  MOD_RES (11)..(11): Alpha-Me S5-pentenyl-alanine olefin amino acid connected by an all-carbon crosslinker comprising one double bond
  MOD_RES (12)..(12): Norleucine
  C-term NH2
LTFAHYWAQLAL

SEQ ID NO: 1014 - protein, 12 aa, Artificial Sequence
  Description of Artificial Sequence: Synthetic peptide
  N-term Ac
  MOD_RES (4)..(4): Alpha-Me R8-octenyl-alanine olefin amino acid connected by an all-carbon crosslinker comprising one double bond
  misc_feature (4)..(11): Crosslink between residues
  MOD_RES (11)..(11): Alpha-Me S5-pentenyl-alanine olefin amino acid connected by an all-carbon crosslinker comprising one double bond
  C-term NH2
LTFAHYWAQLAV

SEQ ID NO: 1015 - protein, 12 aa, Artificial Sequence
  Description of Artificial Sequence: Synthetic peptide
  N-term Ac
  MOD_RES (4)..(4): Alpha-Me R8-octenyl-alanine olefin amino acid connected by an all-carbon crosslinker comprising one double bond
  misc_feature (4)..(11): Crosslink between residues
  MOD_RES (11)..(11): Alpha-Me S5-pentenyl-alanine olefin amino acid connected by an all-carbon crosslinker comprising one double bond
  C-term NH2
LTFAHYWAQLAF

SEQ ID NO: 1016 - protein, 12 aa, Artificial Sequence
  Description of Artificial Sequence: Synthetic peptide
  N-term Ac
  MOD_RES (4)..(4): Alpha-Me R8-octenyl-alanine olefin amino acid connected by an all-carbon crosslinker comprising one double bond
  misc_feature (4)..(11): Crosslink between residues
  MOD_RES (11)..(11): Alpha-Me S5-pentenyl-alanine olefin amino acid connected by an all-carbon crosslinker comprising one double bond
  C-term NH2
LTFAHYWAQLAW

SEQ ID NO: 1017 - protein, 12 aa, Artificial Sequence
  Description of Artificial Sequence: Synthetic peptide
  N-term Ac
  MOD_RES (4)..(4): Alpha-Me R8-octenyl-alanine olefin amino acid connected by an all-carbon crosslinker comprising one double bond
  misc_feature (4)..(11): Crosslink between residues
  MOD_RES (11)..(11): Alpha-Me S5-pentenyl-alanine olefin amino acid connected by an all-carbon crosslinker comprising one double bond
  C-term NH2
LTFAHYWAQLAR

SEQ ID NO: 1018 - protein, 12 aa, Artificial Sequence
  Description of Artificial Sequence: Synthetic peptide
  N-term Ac
  MOD_RES (4)..(4): Alpha-Me R8-octenyl-alanine olefin amino acid connected by an all-carbon crosslinker comprising one double bond
  misc_feature (4)..(11): Crosslink between residues
  MOD_RES (11)..(11): Alpha-Me S5-pentenyl-alanine olefin amino acid connected by an all-carbon crosslinker comprising one double bond
  C-term NH2
LTFAHYWAQLAK

SEQ ID NO: 1019 - protein, 16 aa, Artificial Sequence
  Description of Artificial Sequence: Synthetic peptide
  N-term Ac
  MOD_RES (2)..(2): Alpha-Me R8-octenyl-alanine olefin amino acid connected by an all-carbon crosslinker comprising one double bond
  misc_feature (2)..(9): Crosslink between residues
  MOD_RES (9)..(9): Alpha-Me S5-pentenyl-alanine olefin amino acid connected by an all-carbon crosslinker comprising one double bond
  MOD_RES (14)..(14): 2-aminoisobutyric acid
  C-term NH2
QAQQTFSNAWRLLXQN

SEQ ID NO: 1020 - protein, 16 aa, Artificial Sequence
  Description of Artificial Sequence: Synthetic peptide
  N-term Ac
  MOD_RES (5)..(5): Alpha-Me R8-octenyl-alanine olefin amino acid connected by an all-carbon crosslinker comprising one double bond
  misc_feature (5)..(12): Crosslink between residues
  MOD_RES (12)..(12): Alpha-Me S5-pentenyl-alanine olefin amino acid connected by an all-carbon crosslinker comprising one double bond
  MOD_RES (14)..(14): 2-aminoisobutyric acid
  C-term NH2
QSQQAFSNLWRALXQN

SEQ ID NO: 1021 - protein, 12 aa, Artificial Sequence
  Description of Artificial Sequence: Synthetic peptide
  N-term Ac
  MOD_RES (3)..(3): 2Pal
  MOD_RES (4)..(4): Alpha-Me R8-octenyl-alanine olefin amino acid connected by an all-carbon crosslinker comprising one double bond
  misc_feature (4)..(11): Crosslink between residues
  MOD_RES (11)..(11): Alpha-Me S5-pentenyl-alanine olefin amino acid connected by an all-carbon crosslinker comprising one double bond
  C-term NH2
LTAAHYWAQLAS

SEQ ID NO: 1022 - protein, 12 aa, Artificial Sequence
  Description of Artificial Sequence: Synthetic peptide
  N-term Ac
  MOD_RES (3)..(3): 3Pal
  MOD_RES (4)..(4): Alpha-Me R8-octenyl-alanine olefin amino acid connected by an all-carbon crosslinker comprising one double bond
  misc_feature (4)..(11): Crosslink between residues
  MOD_RES (11)..(11): Alpha-Me S5-pentenyl-alanine olefin amino acid connected by an all-carbon crosslinker comprising one double bond
  C-term NH2
LTAAHYWAQLAS

SEQ ID NO: 1023 - protein, 12 aa, Artificial Sequence
  Description of Artificial Sequence: Synthetic peptide
  N-term Ac
  MOD_RES (3)..(3): 4Pal
  MOD_RES (4)..(4): Alpha-Me R8-octenyl-alanine olefin amino acid connected by an all-carbon crosslinker comprising one double bond
  misc_feature (4)..(11): Crosslink between residues
  MOD_RES (11)..(11): Alpha-Me S5-pentenyl-alanine olefin amino acid connected by an all-carbon crosslinker comprising one double bond
  C-term NH2
LTAAHYWAQLAS

SEQ ID NO: 1024 - protein, 12 aa, Artificial Sequence
  Description of Artificial Sequence: Synthetic peptide
  N-term Ac
  MOD_RES (3)..(3): Phe-2CF3
  MOD_RES (4)..(4): Alpha-Me R8-octenyl-alanine olefin amino acid connected by an all-carbon crosslinker comprising one double bond
  misc_feature (4)..(11): Crosslink between residues
  MOD_RES (11)..(11): Alpha-Me S5-pentenyl-alanine olefin amino acid connected by an all-carbon crosslinker comprising one double bond
  C-term NH2
LTFAHYWAQLAS

SEQ ID NO: 1025 - protein, 12 aa, Artificial Sequence
  Description of Artificial Sequence: Synthetic peptide
  N-term Ac
  MOD_RES (3)..(3): Phe-2CN
  MOD_RES (4)..(4): Alpha-Me R8-octenyl-alanine olefin amino acid connected by an all-carbon crosslinker comprising one double bond
  misc_feature (4)..(11): Crosslink between residues
  MOD_RES (11)..(11): Alpha-Me S5-pentenyl-alanine olefin amino acid connected by an all-carbon crosslinker comprising one double bond
  C-term NH2
LTFAHYWAQLAS

SEQ ID NO: 1026 - protein, 12 aa, Artificial Sequence
  Description of Artificial Sequence: Synthetic peptide
  N-term Ac
  MOD_RES (3)..(3): Phe-2Me
  MOD_RES (4)..(4): Alpha-Me R8-octenyl-alanine olefin amino acid connected by an all-carbon crosslinker comprising one double bond
  misc_feature (4)..(11): Crosslink between residues
  MOD_RES (11)..(11): Alpha-Me S5-pentenyl-alanine olefin amino acid connected by an all-carbon crosslinker comprising one double bond
  C-term NH2
LTFAHYWAQLAS

SEQ ID NO: 1027 - protein, 12 aa, Artificial Sequence
  Description of Artificial Sequence: Synthetic peptide
  N-term Ac
  MOD_RES (3)..(3): 3-Chloro-Phe
  MOD_RES (4)..(4): Alpha-Me R8-octenyl-alanine olefin amino acid connected by an all-carbon crosslinker comprising one double bond
  misc_feature (4)..(11): Crosslink between residues
  MOD_RES (11)..(11): Alpha-Me S5-pentenyl-alanine olefin amino acid connected by an all-carbon crosslinker comprising one double bond
  C-term NH2
LTFAHYWAQLAS

SEQ ID NO: 1028 - protein, 12 aa, Artificial Sequence
  Description of Artificial Sequence: Synthetic peptide
  N-term Ac
  MOD_RES (3)..(3): D-Phe-4CF3
  MOD_RES (4)..(4): Alpha-Me R8-octenyl-alanine olefin amino acid connected by an all-carbon crosslinker comprising one double bond
  misc_feature (4)..(11): Crosslink between residues
  MOD_RES (11)..(11): Alpha-Me S5-pentenyl-alanine olefin amino acid connected by an all-carbon crosslinker comprising one double bond
  C-term NH2
LTFAHYWAQLAS

SEQ ID NO: 1029 - protein, 12 aa, Artificial Sequence
  Description of Artificial Sequence: Synthetic peptide
  N-term Ac
  MOD_RES (3)..(3): Phe-4tBu
  MOD_RES (4)..(4): Alpha-Me R8-octenyl-alanine olefin amino acid connected by an all-carbon crosslinker comprising one double bond
  misc_feature (4)..(11): Crosslink between residues
  MOD_RES (11)..(11): Alpha-Me S5-pentenyl-alanine olefin amino acid connected by an all-carbon crosslinker comprising one double bond
  C-term NH2
LTFAHYWAQLAS

SEQ ID NO: 1030 - protein, 12 aa, Artificial Sequence
  Description of Artificial Sequence: Synthetic peptide
  N-term Ac
  MOD_RES (3)..(3): Phe-5F
  MOD_RES (4)..(4): Alpha-Me R8-octenyl-alanine olefin amino acid connected by an all-carbon crosslinker comprising one double bond
  misc_feature (4)..(11): Crosslink between residues
  MOD_RES (11)..(11): Alpha-Me S5-pentenyl-alanine olefin amino acid connected by an all-carbon crosslinker comprising one double bond
  C-term NH2
LTFAHYWAQLAS

SEQ ID NO: 1031 - protein, 13 aa, Artificial Sequence
  Description of Artificial Sequence: Synthetic peptide
  N-term Ac
  MOD_RES (4)..(4): Alpha-Me R8-octenyl-alanine olefin amino acid connected by an all-carbon crosslinker comprising one double bond
  misc_feature (4)..(12): Crosslink between residues
  MOD_RES (7)..(7): 3Bth
  MOD_RES (12)..(12): Alpha-Me S5-pentenyl-alanine olefin amino acid connected by an all-carbon crosslinker comprising one double bond
  C-term NH2
LTFAHYXAAQLAS

SEQ ID NO: 1032 - protein, 12 aa, Artificial Sequence
  Description of Artificial Sequence: Synthetic peptide
  N-term Ac
  MOD_RES (3)..(3): Phe-2Br
  MOD_RES (4)..(4): Alpha-Me R8-octenyl-alanine olefin amino acid connected by an all-carbon crosslinker comprising one double bond
  misc_feature (4)..(11): Crosslink between residues
  MOD_RES (11)..(11): Alpha-Me S5-pentenyl-alanine olefin amino acid connected by an all-carbon crosslinker comprising one double bond
  C-term NH2
LTFAHYWAQLAS

SEQ ID NO: 1033 - protein, 12 aa, Artificial Sequence
  Description of Artificial Sequence: Synthetic peptide
  N-term Ac
  MOD_RES (3)..(3): Phe-4Br
  MOD_RES (4)..(4): Alpha-Me R8-octenyl-alanine olefin amino acid connected by an all-carbon crosslinker comprising one double bond
  misc_feature (4)..(11): Crosslink between residues
  MOD_RES (11)..(11): Alpha-Me S5-pentenyl-alanine olefin amino acid connected by an all-carbon crosslinker comprising one double bond
  C-term NH2
LTFAHYWAQLAS

SEQ ID NO: 1034 - protein, 12 aa, Artificial Sequence
  Description of Artificial Sequence: Synthetic peptide
  N-term Ac
  MOD_RES (3)..(3): Phe-2Cl
  MOD_RES (4)..(4): Alpha-Me R8-octenyl-alanine olefin amino acid connected by an all-carbon crosslinker comprising one double bond
  misc_feature (4)..(11): Crosslink between residues
  MOD_RES (11)..(11): Alpha-Me S5-pentenyl-alanine olefin amino acid connected by an all-carbon crosslinker comprising one double bond
  C-term NH2
LTFAHYWAQLAS

SEQ ID NO: 1035 - protein, 12 aa, Artificial Sequence
  Description of Artificial Sequence: Synthetic peptide
  N-term Ac
  MOD_RES (3)..(3): Phe-4Cl
  MOD_RES (4)..(4): Alpha-Me R8-octenyl-alanine olefin amino acid connected by an all-carbon crosslinker comprising one double bond
  misc_feature (4)..(11): Crosslink between residues
  MOD_RES (11)..(11): Alpha-Me S5-pentenyl-alanine olefin amino acid connected by an all-carbon crosslinker comprising one double bond
  C-term NH2
LTFAHYWAQLAS

SEQ ID NO: 1036 - protein, 12 aa, Artificial Sequence
  Description of Artificial Sequence: Synthetic peptide
  N-term Ac
  MOD_RES (3)..(3): Phe-3CN
  MOD_RES (4)..(4): Alpha-Me R8-octenyl-alanine olefin amino acid connected by an all-carbon crosslinker comprising one double bond
  misc_feature (4)..(11): Crosslink between residues
  MOD_RES (11)..(11): Alpha-Me S5-pentenyl-alanine olefin amino acid connected by an all-carbon crosslinker comprising one double bond
  C-term NH2
LTFAHYWAQLAS

SEQ ID NO: 1037 - protein, 12 aa, Artificial Sequence
  Description of Artificial Sequence: Synthetic peptide
  N-term Ac
  MOD_RES (3)..(3): Phe-4CN
  MOD_RES (4)..(4): Alpha-Me R8-octenyl-alanine olefin amino acid connected by an all-carbon crosslinker comprising one double bond
  misc_feature (4)..(11): Crosslink between residues
  MOD_RES (11)..(11): Alpha-Me S5-pentenyl-alanine olefin amino acid connected by an all-carbon crosslinker comprising one double bond
  C-term NH2
LTFAHYWAQLAS

SEQ ID NO: 1038 - protein, 12 aa, Artificial Sequence
  Description of Artificial Sequence: Synthetic peptide
  N-term Ac
  MOD_RES (3)..(3): Phe-34Cl2
  MOD_RES (4)..(4): Alpha-Me R8-octenyl-alanine olefin amino acid connected by an all-carbon crosslinker comprising one double bond
  misc_feature (4)..(11): Crosslink between residues
  MOD_RES (11)..(11): Alpha-Me S5-pentenyl-alanine olefin amino acid connected by an all-carbon crosslinker comprising one double bond
  C-term NH2
LTFAHYWAQLAS

SEQ ID NO: 1039 - protein, 12 aa, Artificial Sequence
  Description of Artificial Sequence: Synthetic peptide
  N-term Ac
  MOD_RES (3)..(3): 3,4-difluoro Phe
  MOD_RES (4)..(4): Alpha-Me R8-octenyl-alanine olefin amino acid connected by an all-carbon crosslinker comprising one double bond
  misc_feature (4)..(11): Crosslink between residues
  MOD_RES (11)..(11): Alpha-Me S5-pentenyl-alanine olefin amino acid connected by an all-carbon crosslinker comprising one double bond
  C-term NH2
LTFAHYWAQLAS

SEQ ID NO: 1040 - protein, 12 aa, Artificial Sequence
  Description of Artificial Sequence: Synthetic peptide
  N-term Ac
  MOD_RES (3)..(3): 3,5-difluoro-Phe
  MOD_RES (4)..(4): Alpha-Me R8-octenyl-alanine olefin amino acid connected by an all-carbon crosslinker comprising one double bond
  misc_feature (4)..(11): Crosslink between residues
  MOD_RES (11)..(11): Alpha-Me S5-pentenyl-alanine olefin amino acid connected by an all-carbon crosslinker comprising one double bond
  C-term NH2
LTFAHYWAQLAS

SEQ ID NO: 1041 - protein, 12 aa, Artificial Sequence
  Description of Artificial Sequence: Synthetic peptide
  N-term Ac
  MOD_RES (3)..(3): 3,3-di-Phe
  MOD_RES (4)..(4): Alpha-Me R8-octenyl-alanine olefin amino acid connected by an all-carbon crosslinker comprising one double bond
  misc_feature (4)..(11): Crosslink between residues
  MOD_RES (11)..(11): Alpha-Me S5-pentenyl-alanine olefin amino acid connected by an all-carbon crosslinker comprising one double bond
  C-term NH2
LTFAHYWAQLAS

SEQ ID NO: 1042 - protein, 12 aa, Artificial Sequence
  Description of Artificial Sequence: Synthetic peptide
  N-term Ac
  MOD_RES (3)..(3): 2-Fluoro-Phe
  MOD_RES (4)..(4): Alpha-Me R8-octenyl-alanine olefin amino acid connected by an all-carbon crosslinker comprising one double bond
  misc_feature (4)..(11): Crosslink between residues
  MOD_RES (11)..(11): Alpha-Me S5-pentenyl-alanine olefin amino acid connected by an all-carbon crosslinker comprising one double bond
  C-term NH2
LTFAHYWAQLAS

SEQ ID NO: 1043 - protein, 12 aa, Artificial Sequence
  Description of Artificial Sequence: Synthetic peptide
  N-term Ac
  MOD_RES (3)..(3): 3-fluoro-Phe
  MOD_RES (4)..(4): Alpha-Me R8-octenyl-alanine olefin amino acid connected by an all-carbon crosslinker comprising one double bond
  misc_feature (4)..(11): Crosslink between residues
  MOD_RES (11)..(11): Alpha-Me S5-pentenyl-alanine olefin amino acid connected by an all-carbon crosslinker comprising one double bond
  C-term NH2
LTFAHYWAQLAS

SEQ ID NO: 1044 - protein, 12 aa, Artificial Sequence
  Description of Artificial Sequence: Synthetic peptide
  N-term Ac
  MOD_RES (3)..(3): Phe-4F
  MOD_RES (4)..(4): Alpha-Me R8-octenyl-alanine olefin amino acid connected by an all-carbon crosslinker comprising one double bond
  misc_feature (4)..(11): Crosslink between residues
  MOD_RES (11)..(11): Alpha-Me S5-pentenyl-alanine olefin amino acid connected by an all-carbon crosslinker comprising one double bond
  C-term NH2
LTFAHYWAQLAS

SEQ ID NO: 1045 - protein, 12 aa, Artificial Sequence
  Description of Artificial Sequence: Synthetic peptide
  N-term Ac
  MOD_RES (3)..(3): 4-iodo-Phe
  MOD_RES (4)..(4): Alpha-Me R8-octenyl-alanine olefin amino acid connected by an all-carbon crosslinker comprising one double bond
  misc_feature (4)..(11): Crosslink between residues
  MOD_RES (11)..(11): Alpha-Me S5-pentenyl-alanine olefin amino acid connected by an all-carbon crosslinker comprising one double bond
  C-term NH2
LTFAHYWAQLAS

SEQ ID NO: 1046 - protein, 12 aa, Artificial Sequence
  Description of Artificial Sequence: Synthetic peptide
  N-term Ac
  MOD_RES (3)..(3): Phe-3Me
  MOD_RES (4)..(4): Alpha-Me R8-octenyl-alanine olefin amino acid connected by an all-carbon crosslinker comprising one double bond
  misc_feature (4)..(11): Crosslink between residues
  MOD_RES (11)..(11): Alpha-Me S5-pentenyl-alanine olefin amino acid connected by an all-carbon crosslinker comprising one double bond
  C-term NH2
LTFAHYWAQLAS

SEQ ID NO: 1047 - protein, 12 aa, Artificial Sequence
  Description of Artificial Sequence: Synthetic peptide
  N-term Ac
  MOD_RES (3)..(3): Phe-4Me
  MOD_RES (4)..(4): Alpha-Me R8-octenyl-alanine olefin amino acid connected by an all-carbon crosslinker comprising one double bond
  misc_feature (4)..(11): Crosslink between residues
  MOD_RES (11)..(11): Alpha-Me S5-pentenyl-alanine olefin amino acid connected by an all-carbon crosslinker comprising one double bond
  C-term NH2
LTFAHYWAQLAS

SEQ ID NO: 1048 - protein, 12 aa, Artificial Sequence
  Description of Artificial Sequence: Synthetic peptide
  N-term Ac
  MOD_RES (3)..(3): 1-Naphthalanine
  MOD_RES (4)..(4): Alpha-Me R8-octenyl-alanine olefin amino acid connected by an all-carbon crosslinker comprising one double bond
  misc_feature (4)..(11): Crosslink between residues
  MOD_RES (11)..(11): Alpha-Me S5-pentenyl-alanine olefin amino acid connected by an all-carbon crosslinker comprising one double bond
  C-term NH2
LTAAHYWAQLAS

SEQ ID NO: 1049 - protein, 12 aa, Artificial Sequence
  Description of Artificial Sequence: Synthetic peptide
  N-term Ac
  MOD_RES (3)..(3): 2-Naphthalanine
  MOD_RES (4)..(4): Alpha-Me R8-octenyl-alanine olefin amino acid connected by an all-carbon crosslinker comprising one double bond
  misc_feature (4)..(11): Crosslink between residues
  MOD_RES (11)..(11): Alpha-Me S5-pentenyl-alanine olefin amino acid connected by an all-carbon crosslinker comprising one double bond
  C-term NH2
LTAAHYWAQLAS

SEQ ID NO: 1050 - protein, 12 aa, Artificial Sequence
  Description of Artificial Sequence: Synthetic peptide
  N-term Ac
  MOD_RES (3)..(3): Phe-3CF3
  MOD_RES (4)..(4): Alpha-Me R8-octenyl-alanine olefin amino acid connected by an all-carbon crosslinker comprising one double bond
  misc_feature (4)..(11): Crosslink between residues
  MOD_RES (11)..(11): Alpha-Me S5-pentenyl-alanine olefin amino acid connected by an all-carbon crosslinker comprising one double bond
  C-term NH2
LTFAHYWAQLAS

SEQ ID NO: 1051 - protein, 12 aa, Artificial Sequence
  Description of Artificial Sequence: Synthetic peptide
  N-term Ac
  MOD_RES (3)..(3): Phe-4NO2
  MOD_RES (4)..(4): Alpha-Me R8-octenyl-alanine olefin amino acid connected by an all-carbon crosslinker comprising one double bond
  misc_feature (4)..(11): Crosslink between residues
  MOD_RES (11)..(11): Alpha-Me S5-pentenyl-alanine olefin amino acid connected by an all-carbon crosslinker comprising one double bond
  C-term NH2
LTFAHYWAQLAS

SEQ ID NO: 1052 - protein, 12 aa, Artificial Sequence
  Description of Artificial Sequence: Synthetic peptide
  N-term Ac
  MOD_RES (3)..(3): Phe-3NO2
  MOD_RES (4)..(4): Alpha-Me R8-octenyl-alanine olefin amino acid connected by an all-carbon crosslinker comprising one double bond
  misc_feature (4)..(11): Crosslink between residues
  MOD_RES (11)..(11): Alpha-Me S5-pentenyl-alanine olefin amino acid connected by an all-carbon crosslinker comprising one double bond
  C-term NH2
LTFAHYWAQLAS

SEQ ID NO: 1053 - protein, 12 aa, Artificial Sequence
  Description of Artificial Sequence: Synthetic peptide
  N-term Ac
  MOD_RES (4)..(4): Alpha-Me R8-octenyl-alanine olefin amino acid connected by an all-carbon crosslinker comprising one double bond
  misc_feature (4)..(11): Crosslink between residues
  MOD_RES (5)..(5): 2Thi
  MOD_RES (11)..(11): Alpha-Me S5-pentenyl-alanine olefin amino acid connected by an all-carbon crosslinker comprising one double bond
  C-term NH2
LTFAXYWAQLAS

SEQ ID NO: 1054 - protein, 12 aa, Artificial Sequence
  Description of Artificial Sequence: Synthetic peptide
  N-term Ac
  MOD_RES (4)..(4): Alpha-Me R8-octenyl-alanine olefin amino acid connected by an all-carbon crosslinker comprising one double bond
  misc_feature (4)..(11): Crosslink between residues
  MOD_RES (6)..(6): Bi-Phe
  MOD_RES (11)..(11): Alpha-Me S5-pentenyl-alanine olefin amino acid connected by an all-carbon crosslinker comprising one double bond
  C-term NH2
LTFAHFWAQLAS

SEQ ID NO: 1055 - protein, 12 aa, Artificial Sequence
  Description of Artificial Sequence: Synthetic peptide
  N-term Ac
  MOD_RES (4)..(4): Alpha-Me R8-octenyl-alanine olefin amino acid connected by an all-carbon crosslinker comprising one double bond
  misc_feature (4)..(11): Crosslink between residues
  MOD_RES (6)..(6): Phe-4tBu
  MOD_RES (11)..(11): Alpha-Me S5-pentenyl-alanine olefin amino acid connected by an all-carbon crosslinker comprising one double bond
  C-term NH2
LTFAHFWAQLAS

SEQ ID NO: 1056 - protein, 12 aa, Artificial Sequence
  Description of Artificial Sequence: Synthetic peptide
  N-term Ac
  MOD_RES (4)..(4): Alpha-Me R8-octenyl-alanine olefin amino acid connected by an all-carbon crosslinker comprising one double bond
  misc_feature (4)..(11): Crosslink between residues
  MOD_RES (6)..(6): D-Phe-4CF3
  MOD_RES (11)..(11): Alpha-Me S5-pentenyl-alanine olefin amino acid connected by an all-carbon crosslinker comprising one double bond
  C-term NH2
LTFAHFWAQLAS

SEQ ID NO: 1057 - protein, 12 aa, Artificial Sequence
  Description of Artificial Sequence: Synthetic peptide
  N-term Ac
  MOD_RES (4)..(4): Alpha-Me R8-octenyl-alanine olefin amino acid connected by an all-carbon crosslinker comprising one double bond
  misc_feature (4)..(11): Crosslink between residues
  MOD_RES (6)..(6): Phe-4Cl
  MOD_RES (11)..(11): Alpha-Me S5-pentenyl-alanine olefin amino acid connected by an all-carbon crosslinker comprising one double bond
  C-term NH2
LTFAHFWAQLAS

SEQ ID NO: 1058 - protein, 12 aa, Artificial Sequence
  Description of Artificial Sequence: Synthetic peptide
  N-term Ac
  MOD_RES (4)..(4): Alpha-Me R8-octenyl-alanine olefin amino acid connected by an all-carbon crosslinker comprising one double bond
  misc_feature (4)..(11): Crosslink between residues
  MOD_RES (6)..(6): Phe-4Me
  MOD_RES (11)..(11): Alpha-Me S5-pentenyl-alanine olefin amino acid connected by an all-carbon crosslinker comprising one double bond
  C-term NH2
LTFAHFWAQLAS

SEQ ID NO: 1059 - protein, 12 aa, Artificial Sequence
  Description of Artificial Sequence: Synthetic peptide
  N-term Ac
  MOD_RES (4)..(4): Alpha-Me R8-octenyl-alanine olefin amino acid connected by an all-carbon crosslinker comprising one double bond
  misc_feature (4)..(11): Crosslink between residues
  MOD_RES (6)..(6): Phe-4Br
  MOD_RES (11)..(11): Alpha-Me S5-pentenyl-alanine olefin amino acid connected by an all-carbon crosslinker comprising one double bond
  C-term NH2
LTFAHFWAQLAS

SEQ ID NO: 1060 - protein, 12 aa, Artificial Sequence
  Description of Artificial Sequence: Synthetic peptide
  N-term Ac
  MOD_RES (4)..(4): Alpha-Me R8-octenyl-alanine olefin amino acid connected by an all-carbon crosslinker comprising one double bond
  misc_feature (4)..(11): Crosslink between residues
  MOD_RES (6)..(6): Phe-4CN
  MOD_RES (11)..(11): Alpha-Me S5-pentenyl-alanine olefin amino acid connected by an all-carbon crosslinker comprising one double bond
  C-term NH2
LTFAHFWAQLAS

SEQ ID NO: 1061 - protein, 12 aa, Artificial Sequence
  Description of Artificial Sequence: Synthetic peptide
  N-term Ac
  MOD_RES (4)..(4): Alpha-Me R8-octenyl-alanine olefin amino acid connected by an all-carbon crosslinker comprising one double bond
  misc_feature (4)..(11): Crosslink between residues
  MOD_RES (6)..(6): Phe-4NO2
  MOD_RES (11)..(11): Alpha-Me S5-pentenyl-alanine olefin amino acid connected by an all-carbon crosslinker comprising one double bond
  C-term NH2
LTFAHFWAQLAS

SEQ ID NO: 1062 - protein, 12 aa, Artificial Sequence
  Description of Artificial Sequence: Synthetic peptide
  N-term Ac
  MOD_RES (4)..(4): Alpha-Me R8-octenyl-alanine olefin amino acid connected by an all-carbon crosslinker comprising one double bond
  misc_feature (4)..(11): Crosslink between residues
  MOD_RES (6)..(6): 1-Naphthalanine
  MOD_RES (11)..(11): Alpha-Me S5-pentenyl-alanine olefin amino acid connected by an all-carbon crosslinker comprising one double bond
  C-term NH2
LTFAHAWAQLAS

SEQ ID NO: 1063 - protein, 12 aa, Artificial Sequence
  Description of Artificial Sequence: Synthetic peptide
  N-term Ac
  MOD_RES (4)..(4): Alpha-Me R8-octenyl-alanine olefin amino acid connected by an all-carbon crosslinker comprising one double bond
  misc_feature (4)..(11): Crosslink between residues
  MOD_RES (6)..(6): 2-Naphthalanine
  MOD_RES (11)..(11): Alpha-Me S5-pentenyl-alanine olefin amino acid connected by an all-carbon crosslinker comprising one double bond
  C-term NH2
LTFAHAWAQLAS

SEQ ID NO: 1064 - protein, 11 aa, Artificial Sequence
  Description of Artificial Sequence: Synthetic peptide
  N-term Ac
  MOD_RES (4)..(4): Alpha-Me R8-octenyl-alanine olefin amino acid connected by an all-carbon crosslinker comprising one double bond
  misc_feature (4)..(10): Crosslink between residues
  MOD_RES (10)..(10): Alpha-Me S5-pentenyl-alanine olefin amino acid connected by an all-carbon crosslinker comprising one double bond
  C-term NH2
LTFAHWAQLAS

SEQ ID NO: 1065 - protein, 12 aa, Artificial Sequence
  Description of Artificial Sequence: Synthetic peptide
  N-term Ac
  MOD_RES (4)..(4): Alpha-Me R8-octenyl-alanine olefin amino acid connected by an all-carbon crosslinker comprising one double bond
  misc_feature (4)..(11): Crosslink between residues
  MOD_RES (7)..(7): 1-Naphthalanine
  MOD_RES (11)..(11): Alpha-Me S5-pentenyl-alanine olefin amino acid connected by an all-carbon crosslinker comprising one double bond
  C-term NH2
LTFAHYAAQLAS

SEQ ID NO: 1066 - protein, 12 aa, Artificial Sequence
  Description of Artificial Sequence: Synthetic peptide
  N-term Ac
  MOD_RES (4)..(4): Alpha-Me R8-octenyl-alanine olefin amino acid connected by an all-carbon crosslinker comprising one double bond
  misc_feature (4)..(11): Crosslink between residues
  MOD_RES (7)..(7): 2-Naphthalanine
  MOD_RES (11)..(11): Alpha-Me S5-pentenyl-alanine olefin amino acid connected by an all-carbon crosslinker comprising one double bond
  C-term NH2
LTFAHYAAQLAS

SEQ ID NO: 1067 - protein, 12 aa, Artificial Sequence
  Description of Artificial Sequence: Synthetic peptide
  N-term Ac
  MOD_RES (4)..(4): Alpha-Me R8-octenyl-alanine olefin amino acid connected by an all-carbon crosslinker comprising one double bond
  misc_feature (4)..(11): Crosslink between residues
  MOD_RES (11)..(11): Alpha-Me S5-pentenyl-alanine olefin amino acid connected by an all-carbon crosslinker comprising one double bond
  C-term NH2
LTFAHYWAQIAS

SEQ ID NO: 1068 - protein, 12 aa, Artificial Sequence
  Description of Artificial Sequence: Synthetic peptide
  N-term Ac
  MOD_RES (4)..(4): Alpha-Me R8-octenyl-alanine olefin amino acid connected by an all-carbon crosslinker comprising one double bond
  misc_feature (4)..(11): Crosslink between residues
  MOD_RES (10)..(10): Norleucine
  MOD_RES (11)..(11): Alpha-Me S5-pentenyl-alanine olefin amino acid connected by an all-carbon crosslinker comprising one double bond
  C-term NH2
LTFAHYWAQLAS

SEQ ID NO: 1069 - protein, 12 aa, Artificial Sequence
  Description of Artificial Sequence: Synthetic peptide
  N-term Ac
  MOD_RES (4)..(4): Alpha-Me R8-octenyl-alanine olefin amino acid connected by an all-carbon crosslinker comprising one E configured double bond
  misc_feature (4)..(11): Crosslink between residues
  MOD_RES (11)..(11): Alpha-Me S5-pentenyl-alanine olefin amino acid connected by an all-carbon crosslinker comprising one E configured double bond
  C-term NH2
LTFAHYWAQLAA

SEQ ID NO: 1070 - protein, 12 aa, Artificial Sequence
  Description of Artificial Sequence: Synthetic peptide
  N-term Ac
  MOD_RES (4)..(4): Alpha-Me R8-octenyl-alanine olefin amino acid connected by an all-carbon crosslinker comprising one double bond
  misc_feature (4)..(11): Crosslink between residues
  MOD_RES (11)..(11): Alpha-Me S5-pentenyl-alanine olefin amino acid connected by an all-carbon crosslinker comprising one double bond
  MOD_RES (12)..(12): Abu
  C-term NH2
LTFAHYWAQLAX

SEQ ID NO: 1071 - protein, 12 aa, Artificial Sequence
  Description of Artificial Sequence: Synthetic peptide
  N-term Ac
  MOD_RES (4)..(4): Alpha-Me R8-octenyl-alanine olefin amino acid connected by an all-carbon crosslinker comprising one double bond
  misc_feature (4)..(11): Crosslink between residues
  MOD_RES (8)..(8): Abu
  MOD_RES (11)..(11): Alpha-Me S5-pentenyl-alanine olefin amino acid connected by an all-carbon crosslinker comprising one double bond
  C-term NH2
LTFAHYWXQLAS

SEQ ID NO: 1072 - protein, 12 aa, Artificial Sequence
  Description of Artificial Sequence: Synthetic peptide
  N-term Ac
  MOD_RES (4)..(4): Alpha-Me R8-octenyl-alanine olefin amino acid connected by an all-carbon crosslinker comprising one double bond
  misc_feature (4)..(11): Crosslink between residues
  MOD_RES (11)..(11): Alpha-Me S5-pentenyl-alanine olefin amino acid connected by an all-carbon crosslinker comprising one double bond
  C-term NH2
LAFAHYWAQLAS

SEQ ID NO: 1073 - protein, 12 aa, Artificial Sequence
  Description of Artificial Sequence: Synthetic peptide
  N-term Ac
  MOD_RES (4)..(4): Alpha-Me R8-octenyl-alanine olefin amino acid connected by an all-carbon crosslinker comprising one double bond
  misc_feature (4)..(11): Crosslink between residues
  MOD_RES (9)..(9): Norleucine
  MOD_RES (11)..(11): Alpha-Me S5-pentenyl-alanine olefin amino acid connected by an all-carbon crosslinker comprising one double bond
  C-term NH2
LTFANLWALLAQ

SEQ ID NO: 1074 - protein, 12 aa, Artificial Sequence
  Description of Artificial Sequence: Synthetic peptide
  N-term Ac
  MOD_RES (4)..(4): Alpha-Me R8-octenyl-alanine olefin amino acid connected by an all-carbon crosslinker comprising one double bond
  misc_feature (4)..(11): Crosslink between residues
  MOD_RES (9)..(9): Norleucine
  MOD_RES (11)..(11): Alpha-Me S5-pentenyl-alanine olefin amino acid connected by an all-carbon crosslinker comprising one double bond
  C-term NH2
LTFAALWALLAQ

SEQ ID NO: 1075 - protein, 12 aa, Artificial Sequence
  Description of Artificial Sequence: Synthetic peptide
  N-term Ac
  MOD_RES (4)..(4): Alpha-Me R8-octenyl-alanine olefin amino acid connected by an all-carbon crosslinker comprising one double bond
  misc_feature (4)..(11): Crosslink between residues
  MOD_RES (9)..(9): Norleucine
  MOD_RES (11)..(11): Alpha-Me S5-pentenyl-alanine olefin amino acid connected by an all-carbon crosslinker comprising one double bond
  C-term NH2
LAFANLWALLAQ

SEQ ID NO: 1076 - protein, 10 aa, Artificial Sequence
  Description of Artificial Sequence: Synthetic peptide
  N-term Ac
  MOD_RES (2)..(2): Alpha-Me R8-octenyl-alanine olefin amino acid connected by an all-carbon crosslinker comprising one double bond
  misc_feature (2)..(9): Crosslink between residues
  MOD_RES (7)..(7): Ac3c
  MOD_RES (9)..(9): Alpha-Me S5-pentenyl-alanine olefin amino acid connected by an all-carbon crosslinker comprising one double bond
  C-term NH2
FAAYWAXLAA

SEQ ID NO: 1077 - protein, 12 aa, Artificial Sequence
  Description of Artificial Sequence: Synthetic peptide
  N-term Ac
  MOD_RES (4)..(4): Alpha-Me R8-octenyl-alanine olefin amino acid connected by an all-carbon crosslinker comprising one double bond
  misc_feature (4)..(11): Crosslink between residues
  MOD_RES (11)..(11): Alpha-Me S5-pentenyl-alanine olefin amino acid connected by an all-carbon crosslinker comprising one double bond
  C-term NH2
LTFAAYWAALAS

SEQ ID NO: 1078 - protein, 12 aa, Artificial Sequence
  Description of Artificial Sequence: Synthetic peptide
  N-term Ac
  MOD_RES (4)..(4): Alpha-Me R8-octenyl-alanine olefin amino acid connected by an all-carbon crosslinker comprising one double bond
  misc_feature (4)..(11): Crosslink between residues
  MOD_RES (11)..(11): Alpha-Me S5-pentenyl-alanine olefin amino acid connected by an all-carbon crosslinker comprising one double bond
  C-term NH2
LVFAAYWAQLAS

SEQ ID NO: 1079 - protein, 12 aa, Artificial Sequence
  Description of Artificial Sequence: Synthetic peptide
  N-term Ac
  MOD_RES (4)..(4): Alpha-Me R8-octenyl-alanine olefin amino acid connected by an all-carbon crosslinker comprising one double bond
  misc_feature (4)..(11): Crosslink between residues
  MOD_RES (8)..(8): Abu
  MOD_RES (11)..(11): Alpha-Me S5-pentenyl-alanine olefin amino acid connected by an all-carbon crosslinker comprising one double bond
  C-term NH2
LTFAAYWXQLAS

SEQ ID NO: 1080 - protein, 12 aa, Artificial Sequence
  Description of Artificial Sequence: Synthetic peptide
  N-term Ac
  MOD_RES (4)..(4): Alpha-Me R8-octenyl-alanine olefin amino acid connected by an all-carbon crosslinker comprising one double bond
  misc_feature (4)..(11): Crosslink between residues
  MOD_RES (8)..(8): Norleucine
  MOD_RES (11)..(11): Alpha-Me S5-pentenyl-alanine olefin amino acid connected by an all-carbon crosslinker comprising one double bond
  C-term NH2
LTFAAYWLQLAS

SEQ ID NO: 1081 - protein, 12 aa, Artificial Sequence
  Description of Artificial Sequence: Synthetic peptide
  N-term Ac
  MOD_RES (4)..(4): Alpha-Me R8-octenyl-alanine olefin amino acid connected by an all-carbon crosslinker comprising one double bond
  misc_feature (4)..(11): Crosslink between residues
  MOD_RES (5)..(5): Abu
  MOD_RES (11)..(11): Alpha-Me S5-pentenyl-alanine olefin amino acid connected by an all-carbon crosslinker comprising one double bond
  C-term NH2
LTFAXYWAQLAS

SEQ ID NO: 1082 - protein, 12 aa, Artificial Sequence
  Description of Artificial Sequence: Synthetic peptide
  N-term Ac
  MOD_RES (4)..(4): Alpha-Me R8-octenyl-alanine olefin amino acid connected by an all-carbon crosslinker comprising one double bond
  misc_feature (4)..(11): Crosslink between residues
  MOD_RES (11)..(11): Alpha-Me S5-pentenyl-alanine olefin amino acid connected by an all-carbon crosslinker comprising one double bond
  C-term NH2
LTFAAYWHQLAS

SEQ ID NO: 1083 - protein, 12 aa, Artificial Sequence
  Description of Artificial Sequence: Synthetic peptide
  N-term Ac
  MOD_RES (4)..(4): Alpha-Me R8-octenyl-alanine olefin amino acid connected by an all-carbon crosslinker comprising one double bond
  misc_feature (4)..(11): Crosslink between residues
  MOD_RES (11)..(11): Alpha-Me S5-pentenyl-alanine olefin amino acid connected by an all-carbon crosslinker comprising one double bond
  C-term NH2
LTFAAYWKQLAS

SEQ ID NO: 1084 - protein, 12 aa, Artificial Sequence
  Description of Artificial Sequence: Synthetic peptide
  N-term Ac
  MOD_RES (4)..(4): Alpha-Me R8-octenyl-alanine olefin amino acid connected by an all-carbon crosslinker comprising one double bond
  misc_feature (4)..(11): Crosslink between residues
  MOD_RES (8)..(8): Ornithine
  MOD_RES (11)..(11): Alpha-Me S5-pentenyl-alanine olefin amino acid connected by an all-carbon crosslinker comprising one double bond
  C-term NH2
LTFAAYWXQLAS

SEQ ID NO: 1085 - protein, 12 aa, Artificial Sequence
  Description of Artificial Sequence: Synthetic peptide
  N-term Ac
  MOD_RES (4)..(4): Alpha-Me R8-octenyl-alanine olefin amino acid connected by an all-carbon crosslinker comprising one double bond
  misc_feature (4)..(11): Crosslink between residues
  MOD_RES (11)..(11): Alpha-Me S5-pentenyl-alanine olefin amino acid connected by an all-carbon crosslinker comprising one double bond
  C-term NH2
LTFAAYWRQLAS

SEQ ID NO: 1086 - protein, 12 aa, Artificial Sequence
  Description of Artificial Sequence: Synthetic peptide
  N-term Ac
  MOD_RES (4)..(4): Alpha-Me R8-octenyl-alanine olefin amino acid connected by an all-carbon crosslinker comprising one double bond
  misc_feature (4)..(11): Crosslink between residues
  MOD_RES (11)..(11): Alpha-Me S5-pentenyl-alanine olefin amino acid connected by an all-carbon crosslinker comprising one double bond
  C-term NH2
LTFAAYWSQLAS

SEQ ID NO: 1087 - protein, 12 aa, Artificial Sequence
  Description of Artificial Sequence: Synthetic peptide
  N-term Ac
  MOD_RES (4)..(4): Alpha-Me R8-octenyl-alanine olefin amino acid connected by an all-carbon crosslinker comprising one double bond
  misc_feature (4)..(11): Crosslink between residues
  MOD_RES (11)..(11): Alpha-Me S5-pentenyl-alanine olefin amino acid connected by an all-carbon crosslinker comprising one double bond
  C-term NH2
LTFAAYWRALAS

SEQ ID NO: 1088 - protein, 12 aa, Artificial Sequence
  Description of Artificial Sequence: Synthetic peptide
  N-term Ac
  MOD_RES (4)..(4): Alpha-Me R8-octenyl-alanine olefin amino acid connected by an all-carbon crosslinker comprising one double bond
  misc_feature (4)..(11): Crosslink between residues
  MOD_RES (11)..(11): Alpha-Me S5-pentenyl-alanine olefin amino acid connected by an all-carbon crosslinker comprising one double bond
  C-term NH2
LTFAAYWRQLAA

SEQ ID NO: 1089 - protein, 12 aa, Artificial Sequence
  Description of Artificial Sequence: Synthetic peptide
  N-term Ac
  MOD_RES (4)..(4): Alpha-Me R8-octenyl-alanine olefin amino acid connected by an all-carbon crosslinker comprising one double bond
  misc_feature (4)..(11): Crosslink between residues
  MOD_RES (11)..(11): Alpha-Me S5-pentenyl-alanine olefin amino acid connected by an all-carbon crosslinker comprising one double bond
  C-term NH2
LTFAAYWRALAA

SEQ ID NO: 1090 - protein, 12 aa, Artificial Sequence
  Description of Artificial Sequence: Synthetic peptide
  N-term Ac
  MOD_RES (4)..(4): Alpha-Me R5-pentenyl-alanine olefin amino acid connected by an all-carbon crosslinker comprising one double bond
  misc_feature (4)..(11): Crosslink between residues
  MOD_RES (11)..(11): Alpha-Me S8-octenyl-alanine olefin amino acid connected by an all-carbon crosslinker comprising one double bond
  C-term NH2
LTFAHYWAQLAS

SEQ ID NO: 1091 - protein, 12 aa, Artificial Sequence
  Description of Artificial Sequence: Synthetic peptide
  N-term Ac
  MOD_RES (4)..(4): Alpha-Me S5-pentenyl-alanine olefin amino acid connected by an all-carbon crosslinker comprising one double bond
  misc_feature (4)..(11): Crosslink between residues
  MOD_RES (11)..(11): Alpha-Me R8-octenyl-alanine olefin amino acid connected by an all-carbon crosslinker comprising one double bond
  C-term NH2
LTFAHYWAQLAS

SEQ ID NO: 1092 - protein, 12 aa, Artificial Sequence
  Description of Artificial Sequence: Synthetic peptide
  N-term Ac
  MOD_RES (4)..(4): Alpha-Me R8-octenyl-alanine olefin amino acid connected by an all-carbon crosslinker comprising one double bond
  misc_feature (4)..(11): Crosslink between residues
  MOD_RES (11)..(11): Alpha-Me S5-pentenyl-alanine olefin amino acid connected by an all-carbon crosslinker comprising one double bond
  C-term NH2
LTFAHYWAALAS

SEQ ID NO: 1093 - protein, 12 aa, Artificial Sequence
  Description of Artificial Sequence: Synthetic peptide
  N-term Ac
  MOD_RES (4)..(4): Alpha-Me R8-octenyl-alanine olefin amino acid connected by an all-carbon crosslinker comprising one double bond
  misc_feature (4)..(11): Crosslink between residues
  MOD_RES (9)..(9): Abu
  MOD_RES (11)..(11): Alpha-Me S5-pentenyl-alanine olefin amino acid connected by an all-carbon crosslinker comprising one double bond
  C-term NH2
LTFAHYWAXLAS

SEQ ID NO: 1094 - protein, 12 aa, Artificial Sequence
  Description of Artificial Sequence: Synthetic peptide
  N-term Ac
  MOD_RES (4)..(4): Alpha-Me R8-octenyl-alanine olefin amino acid connected by an all-carbon crosslinker comprising one double bond
  misc_feature (4)..(11): Crosslink between residues
  MOD_RES (11)..(11): Alpha-Me S5-pentenyl-alanine olefin amino acid connected by an all-carbon crosslinker comprising one double bond
  C-term NH2
LTFAHYWALLAS

SEQ ID NO: 1095 - protein, 10 aa, Artificial Sequence
  Description of Artificial Sequence: Synthetic peptide
  N-term Ac
  MOD_RES (2)..(2): Alpha-Me R8-octenyl-alanine olefin amino acid connected by an all-carbon crosslinker comprising one double bond
  misc_feature (2)..(9): Crosslink between residues
  MOD_RES (9)..(9): Alpha-Me S5-pentenyl-alanine olefin amino acid connected by an all-carbon crosslinker comprising one double bond
  C-term NH2
FAAYWHALAA

SEQ ID NO: 1096 - protein, 10 aa, Artificial Sequence
  Description of Artificial Sequence: Synthetic peptide
  N-term Ac
  MOD_RES (2)..(2): Alpha-Me R8-octenyl-alanine olefin amino acid connected by an all-carbon crosslinker comprising one double bond
  misc_feature (2)..(9): Crosslink between residues
  MOD_RES (9)..(9): Alpha-Me S5-pentenyl-alanine olefin amino acid connected by an all-carbon crosslinker comprising one double bond
  C-term NH2
FAAYWAALAA

SEQ ID NO: 1097 - protein, 10 aa, Artificial Sequence
  Description of Artificial Sequence: Synthetic peptide
  N-term Ac
  MOD_RES (2)..(2): Alpha-Me R8-octenyl-alanine olefin amino acid connected by an all-carbon crosslinker comprising one double bond
  misc_feature (2)..(9): Crosslink between residues
  MOD_RES (9)..(9): Alpha-Me S5-pentenyl-alanine olefin amino acid connected by an all-carbon crosslinker comprising one double bond
  C-term NH2
FAAYWSALAA

SEQ ID NO: 1098 - protein, 10 aa, Artificial Sequence
  Description of Artificial Sequence: Synthetic peptide
  N-term Ac
  MOD_RES (2)..(2): Alpha-Me R8-octenyl-alanine olefin amino acid connected by an all-carbon crosslinker comprising one double bond
  misc_feature (2)..(9): Crosslink between residues
  MOD_RES (9)..(9): Alpha-Me S5-pentenyl-alanine olefin amino acid connected by an all-carbon crosslinker comprising one double bond
  C-term NH2
FAAYWRALAA

SEQ ID NO: 1099 - protein, 10 aa, Artificial Sequence
  Description of Artificial Sequence: Synthetic peptide
  N-term Ac
  MOD_RES (2)..(2): Alpha-Me R8-octenyl-alanine olefin amino acid connected by an all-carbon crosslinker comprising one double bond
  misc_feature (2)..(9): Crosslink between residues
  MOD_RES (9)..(9): Alpha-Me S5-pentenyl-alanine olefin amino acid connected by an all-carbon crosslinker comprising one double bond
  C-term NH2
FAAYWKALAA

SEQ ID NO: 1100 - protein, 10 aa, Artificial Sequence
  Description of Artificial Sequence: Synthetic peptide
  N-term Ac
  MOD_RES (2)..(2): Alpha-Me R8-octenyl-alanine olefin amino acid connected by an all-carbon crosslinker comprising one double bond
  misc_feature (2)..(9): Crosslink between residues
  MOD_RES (6)..(6): Ornithine
  MOD_RES (9)..(9): Alpha-Me S5-pentenyl-alanine olefin amino acid connected by an all-carbon crosslinker comprising one double bond
  C-term NH2
FAAYWXALAA

SEQ ID NO: 1101 - protein, 10 aa, Artificial Sequence
  Description of Artificial Sequence: Synthetic peptide
  N-term Ac
  MOD_RES (2)..(2): Alpha-Me R8-octenyl-alanine olefin amino acid connected by an all-carbon crosslinker comprising one double bond
  misc_feature (2)..(9): Crosslink between residues
  MOD_RES (7)..(7): Ac3c
  MOD_RES (9)..(9): Alpha-Me S5-pentenyl-alanine olefin amino acid connected by an all-carbon crosslinker comprising one double bond
  C-term NH2
FAVYWEXLAA

SEQ ID NO: 1102 - protein, 10 aa, Artificial Sequence
  Description of Artificial Sequence: Synthetic peptide
  N-term Ac
  MOD_RES (2)..(2): Alpha-Me R8-octenyl-alanine olefin amino acid connected by an all-carbon crosslinker comprising one double bond
  misc_feature (2)..(9): Crosslink between residues
  MOD_RES (7)..(7): Ac3c
  MOD_RES (9)..(9): Alpha-Me S5-pentenyl-alanine olefin amino acid connected by an all-carbon crosslinker comprising one double bond
  C-term NH2
FAFYWEXLAA

SEQ ID NO: 1103 - protein, 10 aa, Artificial Sequence
  Description of Artificial Sequence: Synthetic peptide
  N-term Ac
  MOD_RES (2)..(2): Alpha-Me R8-octenyl-alanine olefin amino acid connected by an all-carbon crosslinker comprising one double bond
  misc_feature (2)..(9): Crosslink between residues
  MOD_RES (7)..(7): Ac3c
  MOD_RES (9)..(9): Alpha-Me S5-pentenyl-alanine olefin amino acid connected by an all-carbon crosslinker comprising one double bond
  C-term NH2
FAWYWEXLAA

SEQ ID NO: 1104 - protein, 10 aa, Artificial Sequence
  Description of Artificial Sequence: Synthetic peptide
  N-term Ac
  MOD_RES (2)..(2): Alpha-Me R8-octenyl-alanine olefin amino acid connected by an all-carbon crosslinker comprising one double bond
  misc_feature (2)..(9): Crosslink between residues
  MOD_RES (7)..(7): Ac3c
  MOD_RES (9)..(9): Alpha-Me S5-pentenyl-alanine olefin amino acid connected by an all-carbon crosslinker comprising one double bond
  C-term NH2
FARYWEXLAA

SEQ ID NO: 1105 - protein, 10 aa, Artificial Sequence
  Description of Artificial Sequence: Synthetic peptide
  N-term Ac
  MOD_RES (2)..(2): Alpha-Me R8-octenyl-alanine olefin amino acid connected by an all-carbon crosslinker comprising one double bond
  misc_feature (2)..(9): Crosslink between residues
  MOD_RES (7)..(7): Ac3c
  MOD_RES (9)..(9): Alpha-Me S5-pentenyl-alanine olefin amino acid connected by an all-carbon crosslinker comprising one double bond
  C-term NH2
FAKYWEXLAA

SEQ ID NO: 1106 - protein, 10 aa, Artificial Sequence
  Description of Artificial Sequence: Synthetic peptide
  N-term Ac
  MOD_RES (2)..(2): Alpha-Me R8-octenyl-alanine olefin amino acid connected by an all-carbon crosslinker comprising one double bond
  misc_feature (2)..(9): Crosslink between residues
  MOD_RES (4)..(4): Norleucine
  MOD_RES (7)..(7): Ac3c
  MOD_RES (9)..(9): Alpha-Me S5-pentenyl-alanine olefin amino acid connected by an all-carbon crosslinker comprising one double bond
  C-term NH2
FAALWEXLAA

SEQ ID NO: 1107 - protein, 10 aa, Artificial Sequence
  Description of Artificial Sequence: Synthetic peptide
  N-term Ac
  MOD_RES (2)..(2): Alpha-Me R8-octenyl-alanine olefin amino acid connected by an all-carbon crosslinker comprising one double bond
  misc_feature (2)..(9): Crosslink between residues
  MOD_RES (7)..(7): Ac3c
  MOD_RES (9)..(9): Alpha-Me S5-pentenyl-alanine olefin amino acid connected by an all-carbon crosslinker comprising one double bond
  C-term NH2
FAAVWEXLAA

SEQ ID NO: 1108 - protein, 10 aa, Artificial Sequence
  Description of Artificial Sequence: Synthetic peptide
  N-term Ac
  MOD_RES (2)..(2): Alpha-Me R8-octenyl-alanine olefin amino acid connected by an all-carbon crosslinker comprising one double bond
  misc_feature (2)..(9): Crosslink between residues
  MOD_RES (7)..(7): Ac3c
  MOD_RES (9)..(9): Alpha-Me S5-pentenyl-alanine olefin amino acid connected by an all-carbon crosslinker comprising one double bond
  C-term NH2
FAAFWEXLAA

SEQ ID NO: 1109 - protein, 10 aa, Artificial Sequence
  Description of Artificial Sequence: Synthetic peptide
  N-term Ac
  MOD_RES (2)..(2): Alpha-Me R8-octenyl-alanine olefin amino acid connected by an all-carbon crosslinker comprising one double bond
  misc_feature (2)..(9): Crosslink between residues
  MOD_RES (7)..(7): Ac3c
  MOD_RES (9)..(9): Alpha-Me S5-pentenyl-alanine olefin amino acid connected by an all-carbon crosslinker comprising one double bond
  C-term NH2
FAAWWEXLAA

SEQ ID NO: 1110 - protein, 10 aa, Artificial Sequence
  Description of Artificial Sequence: Synthetic peptide
  N-term Ac
  MOD_RES (2)..(2): Alpha-Me R8-octenyl-alanine olefin amino acid connected by an all-carbon crosslinker comprising one double bond
  misc_feature (2)..(9): Crosslink between residues
  MOD_RES (7)..(7): Ac3c
  MOD_RES (9)..(9): Alpha-Me S5-pentenyl-alanine olefin amino acid connected by an all-carbon crosslinker comprising one double bond
  C-term NH2
FAARWEXLAA

SEQ ID NO: 1111 - protein, 10 aa, Artificial Sequence
  Description of Artificial Sequence: Synthetic peptide
  N-term Ac
  MOD_RES (2)..(2): Alpha-Me R8-octenyl-alanine olefin amino acid connected by an all-carbon crosslinker comprising one double bond
  misc_feature (2)..(9): Crosslink between residues
  MOD_RES (7)..(7): Ac3c
  MOD_RES (9)..(9): Alpha-Me S5-pentenyl-alanine olefin amino acid connected by an all-carbon crosslinker comprising one double bond
  C-term NH2
FAAKWEXLAA

SEQ ID NO: 1112 - protein, 10 aa, Artificial Sequence
  Description of Artificial Sequence: Synthetic peptide
  N-term Ac
  MOD_RES (2)..(2): Alpha-Me R8-octenyl-alanine olefin amino acid connected by an all-carbon crosslinker comprising one double bond
  misc_feature (2)..(9): Crosslink between residues
  MOD_RES (7)..(7): Ac3c
  MOD_RES (9)..(9): Alpha-Me S5-pentenyl-alanine olefin amino acid connected by an all-carbon crosslinker comprising one double bond
  C-term NH2
FAAYWVXLAA

SEQ ID NO: 1113 - protein, 10 aa, Artificial Sequence
  Description of Artificial Sequence: Synthetic peptide
  N-term Ac
  MOD_RES (2)..(2): Alpha-Me R8-octenyl-alanine olefin amino acid connected by an all-carbon crosslinker comprising one double bond
  misc_feature (2)..(9): Crosslink between residues
  MOD_RES (7)..(7): Ac3c
  MOD_RES (9)..(9): Alpha-Me S5-pentenyl-alanine olefin amino acid connected by an all-carbon crosslinker comprising one double bond
  C-term NH2
FAAYWFXLAA

SEQ ID NO: 1114 - protein, 10 aa, Artificial Sequence
  Description of Artificial Sequence: Synthetic peptide
  N-term Ac
  MOD_RES (2)..(2): Alpha-Me R8-octenyl-alanine olefin amino acid connected by an all-carbon crosslinker comprising one double bond
  misc_feature (2)..(9): Crosslink between residues
  MOD_RES (7)..(7): Ac3c
  MOD_RES (9)..(9): Alpha-Me S5-pentenyl-alanine olefin amino acid connected by an all-carbon crosslinker comprising one double bond
  C-term NH2
FAAYWWXLAA

SEQ ID NO: 1115 - protein, 10 aa, Artificial Sequence
  Description of Artificial Sequence: Synthetic peptide
  N-term Ac
  MOD_RES (2)..(2): Alpha-Me R8-octenyl-alanine olefin amino acid connected by an all-carbon crosslinker comprising one double bond
  misc_feature (2)..(9): Crosslink between residues
  MOD_RES (7)..(7): Ac3c
  MOD_RES (9)..(9): Alpha-Me S5-pentenyl-alanine olefin amino acid connected by an all-carbon crosslinker comprising one double bond
  C-term NH2
FAAYWRXLAA

SEQ ID NO: 1116 - protein, 10 aa, Artificial Sequence
  Description of Artificial Sequence: Synthetic peptide
  N-term Ac
  MOD_RES (2)..(2): Alpha-Me R8-octenyl-alanine olefin amino acid connected by an all-carbon crosslinker comprising one double bond
  misc_feature (2)..(9): Crosslink between residues
  MOD_RES (7)..(7): Ac3c
  MOD_RES (9)..(9): Alpha-Me S5-pentenyl-alanine olefin amino acid connected by an all-carbon crosslinker comprising one double bond
  C-term NH2
FAAYWKXLAA

SEQ ID NO: 1117 - protein, 10 aa, Artificial Sequence
  Description of Artificial Sequence: Synthetic peptide
  N-term Ac
  MOD_RES (2)..(2): Alpha-Me R8-octenyl-alanine olefin amino acid connected by an all-carbon crosslinker comprising one double bond
  misc_feature (2)..(9): Crosslink between residues
  MOD_RES (9)..(9): Alpha-Me S5-pentenyl-alanine olefin amino acid connected by an all-carbon crosslinker comprising one double bond
  C-term NH2
FAAYWEVLAA

SEQ ID NO: 1118 - protein, 10 aa, Artificial Sequence
  Description of Artificial Sequence: Synthetic peptide
  N-term Ac
  MOD_RES (2)..(2): Alpha-Me R8-octenyl-alanine olefin amino acid connected by an all-carbon crosslinker comprising one double bond
  misc_feature (2)..(9): Crosslink between residues
  MOD_RES (9)..(9): Alpha-Me S5-pentenyl-alanine olefin amino acid connected by an all-carbon crosslinker comprising one double bond
  C-term NH2
FAAYWEFLAA

SEQ ID NO: 1119 - protein, 10 aa, Artificial Sequence
  Description of Artificial Sequence: Synthetic peptide
  N-term Ac
  MOD_RES (2)..(2): Alpha-Me R8-octenyl-alanine olefin amino acid connected by an all-carbon crosslinker comprising one double bond
  misc_feature (2)..(9): Crosslink between residues
  MOD_RES (9)..(9): Alpha-Me S5-pentenyl-alanine olefin amino acid connected by an all-carbon crosslinker comprising one double bond
  C-term NH2
FAAYWEWLAA

SEQ ID NO: 1120 - protein, 10 aa, Artificial Sequence
  Description of Artificial Sequence: Synthetic peptide
  N-term Ac
  MOD_RES (2)..(2): Alpha-Me R8-octenyl-alanine olefin amino acid connected by an all-carbon crosslinker comprising one double bond
  misc_feature (2)..(9): Crosslink between residues
  MOD_RES (9)..(9): Alpha-Me S5-pentenyl-alanine olefin amino acid connected by an all-carbon crosslinker comprising one double bond
  C-term NH2
FAAYWERLAA

SEQ ID NO: 1121 - protein, 10 aa, Artificial Sequence
  Description of Artificial Sequence: Synthetic peptide
  N-term Ac
  MOD_RES (2)..(2): Alpha-Me R8-octenyl-alanine olefin amino acid connected by an all-carbon crosslinker comprising one double bond
  misc_feature (2)..(9): Crosslink between residues
  MOD_RES (9)..(9): Alpha-Me S5-pentenyl-alanine olefin amino acid connected by an all-carbon crosslinker comprising one double bond
  C-term NH2
FAAYWEKLAA

SEQ ID NO: 1122 - protein, 10 aa, Artificial Sequence
  Description of Artificial Sequence: Synthetic peptide
  N-term Ac
  MOD_RES (2)..(2): Alpha-Me R8-octenyl-alanine olefin amino acid connected by an all-carbon crosslinker comprising one double bond
  misc_feature (2)..(9): Crosslink between residues
  MOD_RES (7)..(7): Ac3c
  MOD_RES (9)..(9): Alpha-Me S5-pentenyl-alanine olefin amino acid connected by an all-carbon crosslinker comprising one double bond
  C-term NH2
FAAYWEXLAV

SEQ ID NO: 1123 - protein, 10 aa, Artificial Sequence
  Description of Artificial Sequence: Synthetic peptide
  N-term Ac
  MOD_RES (2)..(2): Alpha-Me R8-octenyl-alanine olefin amino acid connected by an all-carbon crosslinker comprising one double bond
  misc_feature (2)..(9): Crosslink between residues
  MOD_RES (7)..(7): Ac3c
  MOD_RES (9)..(9): Alpha-Me S5-pentenyl-alanine olefin amino acid connected by an all-carbon crosslinker comprising one double bond
  C-term NH2
FAAYWEXLAF

SEQ ID NO: 1124 - protein, 10 aa, Artificial Sequence
  Description of Artificial Sequence: Synthetic peptide
  N-term Ac
  MOD_RES (2)..(2): Alpha-Me R8-octenyl-alanine olefin amino acid connected by an all-carbon crosslinker comprising one double bond
  misc_feature (2)..(9): Crosslink between residues
  MOD_RES (7)..(7): Ac3c
  MOD_RES (9)..(9): Alpha-Me S5-pentenyl-alanine olefin amino acid connected by an all-carbon crosslinker comprising one double bond
  C-term NH2
FAAYWEXLAW

SEQ ID NO: 1125 - protein, 10 aa, Artificial Sequence
  Description of Artificial Sequence: Synthetic peptide
  N-term Ac
  MOD_RES (2)..(2): Alpha-Me R8-octenyl-alanine olefin amino acid connected by an all-carbon crosslinker comprising one double bond
  misc_feature (2)..(9): Crosslink between residues
  MOD_RES (7)..(7): Ac3c
  MOD_RES (9)..(9): Alpha-Me S5-pentenyl-alanine olefin amino acid connected by an all-carbon crosslinker comprising one double bond
  C-term NH2
FAAYWEXLAR

SEQ ID NO: 1126 - protein, 10 aa, Artificial Sequence
  Description of Artificial Sequence: Synthetic peptide
  N-term Ac
  MOD_RES (2)..(2): Alpha-Me R8-octenyl-alanine olefin amino acid connected by an all-carbon crosslinker comprising one double bond
  misc_feature (2)..(9): Crosslink between residues
  MOD_RES (7)..(7): Ac3c
  MOD_RES (9)..(9): Alpha-Me S5-pentenyl-alanine olefin amino acid connected by an all-carbon crosslinker comprising one double bond
  C-term NH2
FAAYWEXLAK

SEQ ID NO: 1127 - protein, 11 aa, Artificial Sequence
  Description of Artificial Sequence: Synthetic peptide
  N-term Ac
  MOD_RES (2)..(2): Alpha-Me R8-octenyl-alanine olefin amino acid connected by an all-carbon crosslinker comprising one double bond
  misc_feature (2)..(9): Crosslink between residues
  MOD_RES (7)..(7): Ac3c
  MOD_RES (9)..(9): Alpha-Me S5-pentenyl-alanine olefin amino acid connected by an all-carbon crosslinker comprising one double bond
  C-term NH2
FAAYWEXLAAV

SEQ ID NO: 1128 - protein, 11 aa, Artificial Sequence
  Description of Artificial Sequence: Synthetic peptide
  N-term Ac
  MOD_RES (2)..(2): Alpha-Me R8-octenyl-alanine olefin amino acid connected by an all-carbon crosslinker comprising one double bond
  misc_feature (2)..(9): Crosslink between residues
  MOD_RES (7)..(7): Ac3c
  MOD_RES (9)..(9): Alpha-Me S5-pentenyl-alanine olefin amino acid connected by an all-carbon crosslinker comprising one double bond
  C-term NH2
FAAYWEXLAAF

SEQ ID NO: 1129 - protein, 11 aa, Artificial Sequence
  Description of Artificial Sequence: Synthetic peptide
  N-term Ac
  MOD_RES (2)..(2): Alpha-Me R8-octenyl-alanine olefin amino acid connected by an all-carbon crosslinker comprising one double bond
  misc_feature (2)..(9): Crosslink between residues
  MOD_RES (7)..(7): Ac3c
  MOD_RES (9)..(9): Alpha-Me S5-pentenyl-alanine olefin amino acid connected by an all-carbon crosslinker comprising one double bond
  C-term NH2
FAAYWEXLAAW

SEQ ID NO: 1130 - protein, 11 aa, Artificial Sequence
  Description of Artificial Sequence: Synthetic peptide
  N-term Ac
  MOD_RES (2)..(2): Alpha-Me R8-octenyl-alanine olefin amino acid connected by an all-carbon crosslinker comprising one double bond
  misc_feature (2)..(9): Crosslink between residues
  MOD_RES (7)..(7): Ac3c
  MOD_RES (9)..(9): Alpha-Me S5-pentenyl-alanine olefin amino acid connected by an all-carbon crosslinker comprising one double bond
  C-term NH2
FAAYWEXLAAR

SEQ ID NO: 1131 - protein, 11 aa, Artificial Sequence
  Description of Artificial Sequence: Synthetic peptide
  N-term Ac
  MOD_RES (2)..(2): Alpha-Me R8-octenyl-alanine olefin amino acid connected by an all-carbon crosslinker comprising one double bond
  misc_feature (2)..(9): Crosslink between residues
  MOD_RES (7)..(7): Ac3c
  MOD_RES (9)..(9): Alpha-Me S5-pentenyl-alanine olefin amino acid connected by an all-carbon crosslinker comprising one double bond
  C-term NH2
FAAYWEXLAAK

SEQ ID NO: 1132 - protein, 11 aa, Artificial Sequence
  Description of Artificial Sequence: Synthetic peptide
  N-term Ac
  MOD_RES (2)..(2): Alpha-Me R8-octenyl-alanine olefin amino acid connected by an all-carbon crosslinker comprising one double bond
  misc_feature (2)..(9): Crosslink between residues
  MOD_RES (7)..(7): Ac3c
  MOD_RES (9)..(9): Alpha-Me S5-pentenyl-alanine olefin amino acid connected by an all-carbon crosslinker comprising one double bond
  C-term NH2
FAAYWEXLAAH

SEQ ID NO: 1133 - protein, 12 aa, Artificial Sequence
  Description of Artificial Sequence: Synthetic peptide
  N-term Ac
  MOD_RES (3)..(3): Phe-2NO2
  MOD_RES (4)..(4): Alpha-Me R8-octenyl-alanine olefin amino acid connected by an all-carbon crosslinker comprising one double bond
  misc_feature (4)..(11): Crosslink between residues
  MOD_RES (11)..(11): Alpha-Me S5-pentenyl-alanine olefin amino acid connected by an all-carbon crosslinker comprising one double bond
  C-term NH2
LTFAHYWAQLAS

SEQ ID NO: 1134 - protein, 12 aa, Artificial Sequence
  Description of Artificial Sequence: Synthetic peptide
  N-term Ac
  MOD_RES (4)..(4): Alpha-Me R8-octenyl-alanine olefin amino acid connected by an all-carbon crosslinker comprising one double bond
  misc_feature (4)..(11): Crosslink between residues
  MOD_RES (11)..(11): Alpha-Me S5-pentenyl-alanine olefin amino acid connected by an all-carbon crosslinker comprising one double bond
  C-term NH2
LTAAHYAAQLAS

SEQ ID NO: 1135 - protein, 12 aa, Artificial Sequence
  Description of Artificial Sequence: Synthetic peptide
  N-term Ac
  MOD_RES (4)..(4): Alpha-Me R8-octenyl-alanine olefin amino acid connected by an all-carbon crosslinker comprising one double bond
  misc_feature (4)..(11): Crosslink between residues
  MOD_RES (11)..(11): Alpha-Me S5-pentenyl-alanine olefin amino acid connected by an all-carbon crosslinker comprising one double bond
  C-term NH2
LTFAHYAAQLAS

SEQ ID NO: 1136 - protein, 16 aa, Artificial Sequence
  Description of Artificial Sequence: Synthetic peptide
  N-term Ac
  MOD_RES (7)..(7): Alpha-Me R8-octenyl-alanine olefin amino acid connected by an all-carbon crosslinker comprising one double bond
  misc_feature (7)..(14): Crosslink between residues
  MOD_RES (14)..(14): Alpha-Me S5-pentenyl-alanine olefin amino acid connected by an all-carbon crosslinker comprising one double bond
  C-term NH2
QSQQTFANLWALLAAN

SEQ ID NO: 1137 - protein, 16 aa, Artificial Sequence
  Description of Artificial Sequence: Synthetic peptide
  N-term Ac
  MOD_RES (2)..(2): 2-aminoisobutyric acid
  MOD_RES (7)..(7): Alpha-Me R8-octenyl-alanine olefin amino acid connected by an all-carbon crosslinker comprising one double bond
  misc_feature (7)..(14): Crosslink between residues
  MOD_RES (14)..(14): Alpha-Me S5-pentenyl-alanine olefin amino acid connected by an all-carbon crosslinker comprising one double bond
  C-term NH2
QXQQTFANLWALLAAN

SEQ ID NO: 1138 - protein, 16 aa, Artificial Sequence
  Description of Artificial Sequence: Synthetic peptide
  N-term Ac
  MOD_RES (2)..(2): 2-aminoisobutyric acid
  MOD_RES (7)..(7): Alpha-Me R8-octenyl-alanine olefin amino acid connected by an all-carbon crosslinker comprising one double bond
  misc_feature (7)..(14): Crosslink between residues
  MOD_RES (14)..(14): Alpha-Me S5-pentenyl-alanine olefin amino acid connected by an all-carbon crosslinker comprising one double bond
  C-term NH2
QXQQTFAALWALLAAN

SEQ ID NO: 1139 - protein, 16 aa, Artificial Sequence
  Description of Artificial Sequence: Synthetic peptide
  N-term Ac
  MOD_RES (7)..(7): Alpha-Me R8-octenyl-alanine olefin amino acid connected by an all-carbon crosslinker comprising one double bond
  misc_feature (7)..(14): Crosslink between residues
  MOD_RES (14)..(14): Alpha-Me S5-pentenyl-alanine olefin amino acid connected by an all-carbon crosslinker comprising one double bond
  C-term NH2
AAAATFAAAWAALAAA

SEQ ID NO: 1140 - protein, 10 aa, Artificial Sequence
  Description of Artificial Sequence: Synthetic peptide
  N-term Ac
  MOD_RES (2)..(2): Alpha-Me R8-octenyl-alanine olefin amino acid connected by an all-carbon crosslinker comprising one double bond
  misc_feature (2)..(9): Crosslink between residues
  MOD_RES (9)..(9): Alpha-Me S5-pentenyl-alanine olefin amino acid connected by an all-carbon crosslinker comprising one double bond
  C-term NH2
FAAAWRALAQ

SEQ ID NO: 1141 - protein, 11 aa, Artificial Sequence
  Description of Artificial Sequence: Synthetic peptide
  N-term Ac
  MOD_RES (3)..(3): Alpha-Me R8-octenyl-alanine olefin amino acid connected by an all-carbon crosslinker comprising one double bond
  misc_feature (3)..(10): Crosslink between residues
  MOD_RES (10)..(10): Alpha-Me S5-pentenyl-alanine olefin amino acid connected by an all-carbon crosslinker comprising one double bond
  C-term NH2
TFAAAWAALAQ

SEQ ID NO: 1142 - protein, 11 aa, Artificial Sequence
  Description of Artificial Sequence: Synthetic peptide
  N-term Ac
  MOD_RES (3)..(3): Alpha-Me R8-octenyl-alanine olefin amino acid connected by an all-carbon crosslinker comprising one double bond
  misc_feature (3)..(10): Crosslink between residues
  MOD_RES (10)..(10): Alpha-Me S5-pentenyl-alanine olefin amino acid connected by an all-carbon crosslinker comprising one double bond
  C-term NH2
TFAAAWRALAA

SEQ ID NO: 1143 - protein, 11 aa, Artificial Sequence
  Description of Artificial Sequence: Synthetic peptide
  N-term Ac
  MOD_RES (3)..(3): Alpha-Me R8-octenyl-alanine olefin amino acid connected by an all-carbon crosslinker comprising one double bond
  misc_feature (3)..(10): Crosslink between residues
  MOD_RES (10)..(10): Alpha-Me S5-pentenyl-alanine olefin amino acid connected by an all-carbon crosslinker comprising one double bond
  C-term NH2
VFAAAWRALAQ

SEQ ID NO: 1144 - protein, 11 aa, Artificial Sequence
  Description of Artificial Sequence: Synthetic peptide
  N-term Ac
  MOD_RES (3)..(3): Alpha-Me R8-octenyl-alanine olefin amino acid connected by an all-carbon crosslinker comprising one double bond
  misc_feature (3)..(10): Crosslink between residues
  MOD_RES (10)..(10): Alpha-Me S5-pentenyl-alanine olefin amino acid connected by an all-carbon crosslinker comprising one double bond
  C-term NH2
AFAAAWAALAA

SEQ ID NO: 1145 - protein, 11 aa, Artificial Sequence
  Description of Artificial Sequence: Synthetic peptide
  N-term Ac
  MOD_RES (3)..(3): Alpha-Me R8-octenyl-alanine olefin amino acid connected by an all-carbon crosslinker comprising one double bond
  misc_feature (3)..(10): Crosslink between residues
  MOD_RES (10)..(10): Alpha-Me S5-pentenyl-alanine olefin amino acid connected by an all-carbon crosslinker comprising one double bond
  C-term NH2
TFAAAWKALAQ

SEQ ID NO: 1146 - protein, 11 aa, Artificial Sequence
  Description of Artificial Sequence: Synthetic peptide
  N-term Ac
  MOD_RES (3)..(3): Alpha-Me R8-octenyl-alanine olefin amino acid connected by an all-carbon crosslinker comprising one double bond
  misc_feature (3)..(10): Crosslink between residues
  MOD_RES (7)..(7): Ornithine
  MOD_RES (10)..(10): Alpha-Me S5-pentenyl-alanine olefin amino acid connected by an all-carbon crosslinker comprising one double bond
  C-term NH2
TFAAAWXALAQ

SEQ ID NO: 1147 - protein, 11 aa, Artificial Sequence
  Description of Artificial Sequence: Synthetic peptide
  N-term Ac
  MOD_RES (3)..(3): Alpha-Me R8-octenyl-alanine olefin amino acid connected by an all-carbon crosslinker comprising one double bond
  misc_feature (3)..(10): Crosslink between residues
  MOD_RES (10)..(10): Alpha-Me S5-pentenyl-alanine olefin amino acid connected by an all-carbon crosslinker comprising one double bond
  C-term NH2
TFAAAWSALAQ

SEQ ID NO: 1148 - protein, 12 aa, Artificial Sequence
  Description of Artificial Sequence: Synthetic peptide
  N-term Ac
  MOD_RES (4)..(4): Alpha-Me R8-octenyl-alanine olefin amino acid connected by an all-carbon crosslinker comprising one double bond
  misc_feature (4)..(11): Crosslink between residues
  MOD_RES (11)..(11): Alpha-Me S5-pentenyl-alanine olefin amino acid connected by an all-carbon crosslinker comprising one double bond
  C-term NH2
LTFAAAWRALAQ

SEQ ID NO: 1149 - protein, 10 aa, Artificial Sequence
  Description of Artificial Sequence: Synthetic peptide
  N-term Ac
  MOD_RES (2)..(2): Alpha-Me R8-octenyl-alanine olefin amino acid connected by an all-carbon crosslinker comprising one double bond
  misc_feature (2)..(9): Crosslink between residues
  MOD_RES (9)..(9): Alpha-Me S5-pentenyl-alanine olefin amino acid connected by an all-carbon crosslinker comprising one double bond
  C-term NH2
FAAYWAQLAA

SEQ ID NO: 1150 - protein, 10 aa, Artificial Sequence
  Description of Artificial Sequence: Synthetic peptide
  N-term Ac
  MOD_RES (2)..(2): Alpha-Me R8-octenyl-alanine olefin amino acid connected by an all-carbon crosslinker comprising one double bond
  misc_feature (2)..(9): Crosslink between residues
  MOD_RES (9)..(9): Alpha-Me S5-pentenyl-alanine olefin amino acid connected by an all-carbon crosslinker comprising one double bond
  C-term NH2
FAAWWAALAA

SEQ ID NO: 1151 - protein, 10 aa, Artificial Sequence
  Description of Artificial Sequence: Synthetic peptide
  N-term Ac
  MOD_RES (2)..(2): Alpha-Me R8-octenyl-alanine olefin amino acid connected by an all-carbon crosslinker comprising one double bond
  misc_feature (2)..(9): Crosslink between residues
  MOD_RES (9)..(9): Alpha-Me S5-pentenyl-alanine olefin amino acid connected by an all-carbon crosslinker comprising one double bond
  C-term NH2
FAAWWAQLAA

SEQ ID NO: 1152 - protein, 9 aa, Artificial Sequence
  Description of Artificial Sequence: Synthetic peptide
  N-term Ac
  MOD_RES (2)..(2): Alpha-Me R8-octenyl-alanine olefin amino acid connected by an all-carbon crosslinker comprising one double bond
  misc_feature (2)..(9): Crosslink between residues
  MOD_RES (9)..(9): Alpha-Me S5-pentenyl-alanine olefin amino acid connected by an all-carbon crosslinker comprising one double bond
  C-term NH2
FAAYWEALA

SEQ ID NO: 1153 - protein, 9 aa, Artificial Sequence
  Description of Artificial Sequence: Synthetic peptide
  N-term Ac
  MOD_RES (2)..(2): Alpha-Me R8-octenyl-alanine olefin amino acid connected by an all-carbon crosslinker comprising one double bond
  misc_feature (2)..(9): Crosslink between residues
  MOD_RES (9)..(9): Alpha-Me S5-pentenyl-alanine olefin amino acid connected by an all-carbon crosslinker comprising one double bond
  C-term NH2
FAAYWAALA

SEQ ID NO: 1154 - protein, 9 aa, Artificial Sequence
  Description of Artificial Sequence: Synthetic peptide
  N-term Ac
  MOD_RES (2)..(2): Alpha-Me R8-octenyl-alanine olefin amino acid connected by an all-carbon crosslinker comprising one double bond
  misc_feature (2)..(9): Crosslink between residues
  MOD_RES (9)..(9): Alpha-Me S5-pentenyl-alanine olefin amino acid connected by an all-carbon crosslinker comprising one double bond
  C-term NH2
FAAYWKALA

SEQ ID NO: 1155 - protein, 9 aa, Artificial Sequence
  Description of Artificial Sequence: Synthetic peptide
  N-term Ac
  MOD_RES (2)..(2): Alpha-Me R8-octenyl-alanine olefin amino acid connected by an all-carbon crosslinker comprising one double bond
  misc_feature (2)..(9): Crosslink between residues
  MOD_RES (6)..(6): Ornithine
  MOD_RES (9)..(9): Alpha-Me S5-pentenyl-alanine olefin amino acid connected by an all-carbon crosslinker comprising one double bond
  C-term NH2
FAAYWXALA

SEQ ID NO: 1156 - protein, 9 aa, Artificial Sequence
  Description of Artificial Sequence: Synthetic peptide
  N-term Ac
  MOD_RES (2)..(2): Alpha-Me R8-octenyl-alanine olefin amino acid connected by an all-carbon crosslinker comprising one double bond
  misc_feature (2)..(9): Crosslink between residues
  MOD_RES (9)..(9): Alpha-Me S5-pentenyl-alanine olefin amino acid connected by an all-carbon crosslinker comprising one double bond
  C-term NH2
FAAYWQALA

SEQ ID NO: 1157 - protein, 9 aa, Artificial Sequence
  Description of Artificial Sequence: Synthetic peptide
  N-term Ac
  MOD_RES (2)..(2): Alpha-Me R8-octenyl-alanine olefin amino acid connected by an all-carbon crosslinker comprising one double bond
  misc_feature (2)..(9): Crosslink between residues
  MOD_RES (9)..(9): Alpha-Me S5-pentenyl-alanine olefin amino acid connected by an all-carbon crosslinker comprising one double bond
  C-term NH2
FAAYWAQLA

SEQ ID NO: 1158 - protein, 10 aa, Artificial Sequence
  Description of Artificial Sequence: Synthetic peptide
  N-term Ac
  MOD_RES (2)..(2): Alpha-Me R8-octenyl-alanine olefin amino acid connected by an all-carbon crosslinker comprising one double bond
  misc_feature (2)..(9): Crosslink between residues
  MOD_RES (9)..(9): Alpha-Me S5-pentenyl-alanine olefin amino acid connected by an all-carbon crosslinker comprising one double bond
  C-term NH2
FAHYWDQLAS

SEQ ID NO: 1159 - protein, 10 aa, Artificial Sequence
  Description of Artificial Sequence: Synthetic peptide
  N-term Ac
  MOD_RES (2)..(2): Alpha-Me R8-octenyl-alanine olefin amino acid connected by an all-carbon crosslinker comprising one double bond
  misc_feature (2)..(9): Crosslink between residues
  MOD_RES (9)..(9): Alpha-Me S5-pentenyl-alanine olefin amino acid connected by an all-carbon crosslinker comprising one double bond
  C-term NH2
FAHFWEQLAS

SEQ ID NO: 1160 - protein, 10 aa, Artificial Sequence
  Description of Artificial Sequence: Synthetic peptide
  N-term Ac
  MOD_RES (2)..(2): Alpha-Me R8-octenyl-alanine olefin amino acid connected by an all-carbon crosslinker comprising one double bond
  misc_feature (2)..(9): Crosslink between residues
  MOD_RES (9)..(9): Alpha-Me S5-pentenyl-alanine olefin amino acid connected by an all-carbon crosslinker comprising one double bond
  C-term NH2
FAAYWHQLAS

SEQ ID NO: 1161 - protein, 10 aa, Artificial Sequence
  Description of Artificial Sequence: Synthetic peptide
  N-term Ac
  MOD_RES (2)..(2): Alpha-Me R8-octenyl-alanine olefin amino acid connected by an all-carbon crosslinker comprising one double bond
  misc_feature (2)..(9): Crosslink between residues
  MOD_RES (9)..(9): Alpha-Me S5-pentenyl-alanine olefin amino acid connected by an all-carbon crosslinker comprising one double bond
  C-term NH2
FAAYWKQLAS

SEQ ID NO: 1162 - protein, 10 aa, Artificial Sequence
  Description of Artificial Sequence: Synthetic peptide
  N-term Ac
  MOD_RES (2)..(2): Alpha-Me R8-octenyl-alanine olefin amino acid connected by an all-carbon crosslinker comprising one double bond
  misc_feature (2)..(9): Crosslink between residues
  MOD_RES (6)..(6): Ornithine
  MOD_RES (9)..(9): Alpha-Me S5-pentenyl-alanine olefin amino acid connected by an all-carbon crosslinker comprising one double bond
  C-term NH2
FAAYWXQLAS

SEQ ID NO: 1163 - protein, 10 aa, Artificial Sequence
  Description of Artificial Sequence: Synthetic peptide
  N-term Ac
  MOD_RES (2)..(2): Alpha-Me R8-octenyl-alanine olefin amino acid connected by an all-carbon crosslinker comprising one double bond
  misc_feature (2)..(9): Crosslink between residues
  MOD_RES (9)..(9): Alpha-Me S5-pentenyl-alanine olefin amino acid connected by an all-carbon crosslinker comprising one double bond
  C-term NH2
FAHYWSQLAS

SEQ ID NO: 1164 - protein, 10 aa, Artificial Sequence
  Description of Artificial Sequence: Synthetic peptide
  N-term Ac
  MOD_RES (2)..(2): Alpha-Me R8-octenyl-alanine olefin amino acid connected by an all-carbon crosslinker comprising one double bond
  misc_feature (2)..(9): Crosslink between residues
  MOD_RES (9)..(9): Alpha-Me S5-pentenyl-alanine olefin amino acid connected by an all-carbon crosslinker comprising one double bond
  C-term NH2
FAHWWEQLAS

SEQ ID NO: 1165 - protein, 10 aa, Artificial Sequence
  Description of Artificial Sequence: Synthetic peptide
  N-term Ac
  MOD_RES (2)..(2): Alpha-Me R8-octenyl-alanine olefin amino acid connected by an all-carbon crosslinker comprising one double bond
  misc_feature (2)..(9): Crosslink between residues
  MOD_RES (9)..(9): Alpha-Me S5-pentenyl-alanine olefin amino acid connected by an all-carbon crosslinker comprising one double bond
  C-term NH2
FAHWWAQLAS

SEQ ID NO: 1166 - protein, 10 aa, Artificial Sequence
  Description of Artificial Sequence: Synthetic peptide
  N-term Ac
  MOD_RES (2)..(2): Alpha-Me R8-octenyl-alanine olefin amino acid connected by an all-carbon crosslinker comprising one double bond
  misc_feature (2)..(9): Crosslink between residues
  MOD_RES (9)..(9): Alpha-Me S5-pentenyl-alanine olefin amino acid connected by an all-carbon crosslinker comprising one double bond
  C-term NH2
FAAWWHQLAS

SEQ ID NO: 1167 - protein, 10 aa, Artificial Sequence
  Description of Artificial Sequence: Synthetic peptide
  N-term Ac
  MOD_RES (2)..(2): Alpha-Me R8-octenyl-alanine olefin amino acid connected by an all-carbon crosslinker comprising one double bond
  misc_feature (2)..(9): Crosslink between residues
  MOD_RES (9)..(9): Alpha-Me S5-pentenyl-alanine olefin amino acid connected by an all-carbon crosslinker comprising one double bond
  C-term NH2
FAAWWKQLAS

SEQ ID NO: 1168 - protein, 10 aa, Artificial Sequence
  Description of Artificial Sequence: Synthetic peptide
  N-term Ac
  MOD_RES (2)..(2): Alpha-Me R8-octenyl-alanine olefin amino acid connected by an all-carbon crosslinker comprising one double bond
  misc_feature (2)..(9): Crosslink between residues
  MOD_RES (6)..(6): Ornithine
  MOD_RES (9)..(9): Alpha-Me S5-pentenyl-alanine olefin amino acid connected by an all-carbon crosslinker comprising one double bond
  C-term NH2
FAAWWXQLAS

SEQ ID NO: 1169 - protein, 10 aa, Artificial Sequence
  Description of Artificial Sequence: Synthetic peptide
  N-term Ac
  MOD_RES (2)..(2): Alpha-Me R8-octenyl-alanine olefin amino acid connected by an all-carbon crosslinker comprising one double bond
  misc_feature (2)..(9): Crosslink between residues
  MOD_RES (9)..(9): Alpha-Me S5-pentenyl-alanine olefin amino acid connected by an all-carbon crosslinker comprising one double bond
  C-term NH2
FAHWWSQLAS

SEQ ID NO: 1170 - protein, 12 aa, Artificial Sequence
  Description of Artificial Sequence: Synthetic peptide
  N-term Ac
  MOD_RES (4)..(4): Alpha-Me R8-octenyl-alanine olefin amino acid connected by an all-carbon crosslinker comprising one double bond
  misc_feature (4)..(11): Crosslink between residues
  MOD_RES (9)..(9): Norleucine
  MOD_RES (11)..(11): Alpha-Me S5-pentenyl-alanine olefin amino acid connected by an all-carbon crosslinker comprising one double bond
  C-term NH2
LTFANYWALLAQ

SEQ ID NO: 1171 - protein, 12 aa, Artificial Sequence
  Description of Artificial Sequence: Synthetic peptide
  N-term Ac
  MOD_RES (4)..(4): Alpha-Me R8-octenyl-alanine olefin amino acid connected by an all-carbon crosslinker comprising one double bond
  misc_feature (4)..(11): Crosslink between residues
  MOD_RES (11)..(11): Alpha-Me S5-pentenyl-alanine olefin amino acid connected by an all-carbon crosslinker comprising one double bond
  C-term NH2
LTFANLWAQLAQ

SEQ ID NO: 1172 - protein, 12 aa, Artificial Sequence
  Description of Artificial Sequence: Synthetic peptide
  N-term Ac
  MOD_RES (4)..(4): Alpha-Me R8-octenyl-alanine olefin amino acid connected by an all-carbon crosslinker comprising one double bond
  misc_feature (4)..(11): Crosslink between residues
  MOD_RES (9)..(9): Norleucine
  MOD_RES (11)..(11): Alpha-Me S5-pentenyl-alanine olefin amino acid connected by an all-carbon crosslinker comprising one double bond
  C-term NH2
LTFANYWALLAA

SEQ ID NO: 1173 - protein, 12 aa, Artificial Sequence
  Description of Artificial Sequence: Synthetic peptide
  N-term Ac
  MOD_RES (4)..(4): Alpha-Me R8-octenyl-alanine olefin amino acid connected by an all-carbon crosslinker comprising one double bond
  misc_feature (4)..(11): Crosslink between residues
  MOD_RES (11)..(11): Alpha-Me S5-pentenyl-alanine olefin amino acid connected by an all-carbon crosslinker comprising one double bond
  C-term NH2
LTFANLWAQLAA

SEQ ID NO: 1174 - protein, 12 aa, Artificial Sequence
  Description of Artificial Sequence: Synthetic peptide
  N-term Ac
  MOD_RES (4)..(4): Alpha-Me R8-octenyl-alanine olefin amino acid connected by an all-carbon crosslinker comprising one double bond
  misc_feature (4)..(11): Crosslink between residues
  MOD_RES (9)..(9): Norleucine
  MOD_RES (11)..(11): Alpha-Me S5-pentenyl-alanine olefin amino acid connected by an all-carbon crosslinker comprising one double bond
  C-term NH2
LTFAAYWALLAQ

SEQ ID NO: 1175 - protein, 12 aa, Artificial Sequence
  Description of Artificial Sequence: Synthetic peptide
  N-term Ac
  MOD_RES (4)..(4): Alpha-Me R8-octenyl-alanine olefin amino acid connected by an all-carbon crosslinker comprising one double bond
  misc_feature (4)..(11): Crosslink between residues
  MOD_RES (11)..(11): Alpha-Me S5-pentenyl-alanine olefin amino acid connected by an all-carbon crosslinker comprising one double bond
  C-term NH2
LTFAALWAQLAQ

SEQ ID NO: 1176 - protein, 12 aa, Artificial Sequence
  Description of Artificial Sequence: Synthetic peptide
  N-term Ac
  MOD_RES (4)..(4): Alpha-Me R8-octenyl-alanine olefin amino acid connected by an all-carbon crosslinker comprising one double bond
  misc_feature (4)..(11): Crosslink between residues
  MOD_RES (9)..(9): Norleucine
  MOD_RES (11)..(11): Alpha-Me S5-pentenyl-alanine olefin amino acid connected by an all-carbon crosslinker comprising one double bond
  C-term NH2
LAFANYWALLAQ

SEQ ID NO: 1177 - protein, 12 aa, Artificial Sequence
  Description of Artificial Sequence: Synthetic peptide
  N-term Ac
  MOD_RES (4)..(4): Alpha-Me R8-octenyl-alanine olefin amino acid connected by an all-carbon crosslinker comprising one double bond
  misc_feature (4)..(11): Crosslink between residues
  MOD_RES (11)..(11): Alpha-Me S5-pentenyl-alanine olefin amino acid connected by an all-carbon crosslinker comprising one double bond
  C-term NH2
LAFANLWAQLAQ

SEQ ID NO: 1178 - protein, 12 aa, Artificial Sequence
  Description of Artificial Sequence: Synthetic peptide
  N-term Ac
  MOD_RES (4)..(4): Alpha-Me R8-octenyl-alanine olefin amino acid connected by an all-carbon crosslinker comprising one double bond
  misc_feature (4)..(11): Crosslink between residues
  MOD_RES (9)..(9): Norleucine
  MOD_RES (11)..(11): Alpha-Me S5-pentenyl-alanine olefin amino acid connected by an all-carbon crosslinker comprising one double bond
  C-term NH2
LAFAAYWALLAA

SEQ ID NO: 1179 - protein, 12 aa, Artificial Sequence
  Description of Artificial Sequence: Synthetic peptide
  N-term Ac
  MOD_RES (4)..(4): Alpha-Me R8-octenyl-alanine olefin amino acid connected by an all-carbon crosslinker comprising one double bond
  misc_feature (4)..(11): Crosslink between residues
  MOD_RES (11)..(11): Alpha-Me S5-pentenyl-alanine olefin amino acid connected by an all-carbon crosslinker comprising one double bond
  C-term NH2
LAFAALWAQLAA

SEQ ID NO: 1180 - protein, 12 aa, Artificial Sequence
  Description of Artificial Sequence: Synthetic peptide
  N-term Ac
  MOD_RES (4)..(4): Alpha-Me R8-octenyl-alanine olefin amino acid connected by an all-carbon crosslinker comprising one double bond
  misc_feature (4)..(11): Crosslink between residues
  MOD_RES (11)..(11): Alpha-Me S5-pentenyl-alanine olefin amino acid connected by an all-carbon crosslinker comprising one double bond
  C-term NH2
LAFAAYWAALAA

SEQ ID NO: 1181 - protein, 11 aa, Artificial Sequence
  Description of Artificial Sequence: Synthetic peptide
  N-term Ac
  MOD_RES (2)..(2): Alpha-Me R8-octenyl-alanine olefin amino acid connected by an all-carbon crosslinker comprising one double bond
  misc_feature (2)..(9): Crosslink between residues
  MOD_RES (7)..(7): Ac3c
  MOD_RES (9)..(9): Alpha-Me S5-pentenyl-alanine olefin amino acid connected by an all-carbon crosslinker comprising one double bond
  MOD_RES (11)..(11): 2-aminoisobutyric acid
  C-term NH2
FAAYWEXLAAX

SEQ ID NO: 1182 - protein, 11 aa, Artificial Sequence
  Description of Artificial Sequence: Synthetic peptide
  N-term Ac
  MOD_RES (2)..(2): Alpha-Me R8-octenyl-alanine olefin amino acid connected by an all-carbon crosslinker comprising one double bond
  misc_feature (2)..(9): Crosslink between residues
  MOD_RES (9)..(9): Alpha-Me S5-pentenyl-alanine olefin amino acid connected by an all-carbon crosslinker comprising one double bond
  C-term NH2
FAAYWAQLAAA

SEQ ID NO: 1183 - protein, 11 aa, Artificial Sequence
  Description of Artificial Sequence: Synthetic peptide
  N-term Ac
  MOD_RES (2)..(2): Alpha-Me R8-octenyl-alanine olefin amino acid connected by an all-carbon crosslinker comprising one double bond
  misc_feature (2)..(9): Crosslink between residues
  MOD_RES (7)..(7): Ac3c
  MOD_RES (9)..(9): Alpha-Me S5-pentenyl-alanine olefin amino acid connected by an all-carbon crosslinker comprising one double bond
  C-term NH2
FAAYWAXLAAA

SEQ ID NO: 1184 - protein, 11 aa, Artificial Sequence
  Description of Artificial Sequence: Synthetic peptide
  N-term Ac
  MOD_RES (2)..(2): Alpha-Me R8-octenyl-alanine olefin amino acid connected by an all-carbon crosslinker comprising one double bond
  misc_feature (2)..(9): Crosslink between residues
  MOD_RES (7)..(7): Ac3c
  MOD_RES (9)..(9): Alpha-Me S5-pentenyl-alanine olefin amino acid connected by an all-carbon crosslinker comprising one double bond
  C-term NH2
FAAYWSXLAAA

SEQ ID NO: 1185 - protein, 11 aa, Artificial Sequence
  Description of Artificial Sequence: Synthetic peptide
  N-term Ac
  MOD_RES (2)..(2): Alpha-Me R8-octenyl-alanine olefin amino acid connected by an all-carbon crosslinker comprising one double bond
  misc_feature (2)..(9): Crosslink between residues
  MOD_RES (7)..(7): Ac3c
  MOD_RES (9)..(9): Alpha-Me S5-pentenyl-alanine olefin amino acid connected by an all-carbon crosslinker comprising one double bond
  C-term NH2
FAAYWEXLAAS

SEQ ID NO: 1186 - protein, 11 aa, Artificial Sequence
  Description of Artificial Sequence: Synthetic peptide
  N-term Ac
  MOD_RES (2)..(2): Alpha-Me R8-octenyl-alanine olefin amino acid connected by an all-carbon crosslinker comprising one double bond
  misc_feature (2)..(9): Crosslink between residues
  MOD_RES (7)..(7): Ac3c
  MOD_RES (9)..(9): Alpha-Me S5-pentenyl-alanine olefin amino acid connected by an all-carbon crosslinker comprising one double bond
  C-term NH2
FAAYWEXLAAT

SEQ ID NO: 1187 - protein, 11 aa, Artificial Sequence
  Description of Artificial Sequence: Synthetic peptide
  N-term Ac
  MOD_RES (2)..(2): Alpha-Me R8-octenyl-alanine olefin amino acid connected by an all-carbon crosslinker comprising one double bond
  misc_feature (2)..(9): Crosslink between residues
  MOD_RES (7)..(7): Ac3c
  MOD_RES (9)..(9): Alpha-Me S5-pentenyl-alanine olefin amino acid connected by an all-carbon crosslinker comprising one double bond
  C-term NH2
FAAYWEXLAAL

SEQ ID NO: 1188 - protein, 11 aa, Artificial Sequence
  Description of Artificial Sequence: Synthetic peptide
  N-term Ac
  MOD_RES (2)..(2): Alpha-Me R8-octenyl-alanine olefin amino acid connected by an all-carbon crosslinker comprising one double bond
  misc_feature (2)..(9): Crosslink between residues
  MOD_RES (7)..(7): Ac3c
  MOD_RES (9)..(9): Alpha-Me S5-pentenyl-alanine olefin amino acid connected by an all-carbon crosslinker comprising one double bond
  C-term NH2
FAAYWEXLAAQ

SEQ ID NO: 1189 - protein, 11 aa, Artificial Sequence
  Description of Artificial Sequence: Synthetic peptide
  N-term Ac
  MOD_RES (2)..(2): Alpha-Me R8-octenyl-alanine olefin amino acid connected by an all-carbon crosslinker comprising one double bond
  misc_feature (2)..(9): Crosslink between residues
  MOD_RES (7)..(7): Ac3c
  MOD_RES (9)..(9): Alpha-Me S5-pentenyl-alanine olefin amino acid connected by an all-carbon crosslinker comprising one double bond
  C-term NH2
FAAFWEXLAAA

SEQ ID NO: 1190 - protein, 11 aa, Artificial Sequence
  Description of Artificial Sequence: Synthetic peptide
  N-term Ac
  MOD_RES (2)..(2): Alpha-Me R8-octenyl-alanine olefin amino acid connected by an all-carbon crosslinker comprising one double bond
  misc_feature (2)..(9): Crosslink between residues
  MOD_RES (7)..(7): Ac3c
  MOD_RES (9)..(9): Alpha-Me S5-pentenyl-alanine olefin amino acid connected by an all-carbon crosslinker comprising one double bond
  C-term NH2
FAAWWEXLAAA

SEQ ID NO: 1191 - protein, 11 aa, Artificial Sequence
  Description of Artificial Sequence: Synthetic peptide
  N-term Ac
  MOD_RES (2)..(2): Alpha-Me R8-octenyl-alanine olefin amino acid connected by an all-carbon crosslinker comprising one double bond
  misc_feature (2)..(9): Crosslink between residues
  MOD_RES (7)..(7): Ac3c
  MOD_RES (9)..(9): Alpha-Me S5-pentenyl-alanine olefin amino acid connected by an all-carbon crosslinker comprising one double bond
  C-term NH2
FAAYWEXLASA

SEQ ID NO: 1192 - protein, 11 aa, Artificial Sequence
  Description of Artificial Sequence: Synthetic peptide
  N-term Ac
  MOD_RES (2)..(2): Alpha-Me R8-octenyl-alanine olefin amino acid connected by an all-carbon crosslinker comprising one double bond
  misc_feature (2)..(9): Crosslink between residues
  MOD_RES (9)..(9): Alpha-Me S5-pentenyl-alanine olefin amino acid connected by an all-carbon crosslinker comprising one double bond
  C-term NH2
FAAYWEALAAA

SEQ ID NO: 1193 - protein, 11 aa, Artificial Sequence
  Description of Artificial Sequence: Synthetic peptide
  N-term Ac
  MOD_RES (2)..(2): Alpha-Me R8-octenyl-alanine olefin amino acid connected by an all-carbon crosslinker comprising one double bond
  misc_feature (2)..(9): Crosslink between residues
  MOD_RES (7)..(7): Norleucine
  MOD_RES (9)..(9): Alpha-Me S5-pentenyl-alanine olefin amino acid connected by an all-carbon crosslinker comprising one double bond
  C-term NH2
FAAYWELLAAA

SEQ ID NO: 1194 - protein, 11 aa, Artificial Sequence
  Description of Artificial Sequence: Synthetic peptide
  N-term Ac
  MOD_RES (2)..(2): Alpha-Me R8-octenyl-alanine olefin amino acid connected by an all-carbon crosslinker comprising one double bond
  misc_feature (2)..(9): Crosslink between residues
  MOD_RES (7)..(7): Ac3c
  MOD_RES (9)..(9): Alpha-Me S5-pentenyl-alanine olefin amino acid connected by an all-carbon crosslinker comprising one double bond
  MOD_RES (10)..(10): Abu
  C-term NH2
FAAYWEXLAXA

SEQ ID NO: 1195 - protein, 11 aa, Artificial Sequence
  Description of Artificial Sequence: Synthetic peptide
  N-term Ac
  MOD_RES (2)..(2): Alpha-Me R8-octenyl-alanine olefin amino acid connected by an all-carbon crosslinker comprising one double bond
  misc_feature (2)..(9): Crosslink between residues
  MOD_RES (7)..(7): Ac3c
  MOD_RES (9)..(9): Alpha-Me S5-pentenyl-alanine olefin amino acid connected by an all-carbon crosslinker comprising one double bond
  MOD_RES (10)..(10): Norleucine
  C-term NH2
FAAYWEXLALA

SEQ ID NO: 1196 - protein, 11 aa, Artificial Sequence
  Description of Artificial Sequence: Synthetic peptide
  N-term Ac
  MOD_RES (2)..(2): Alpha-Me R8-octenyl-alanine olefin amino acid connected by an all-carbon crosslinker comprising one double bond
  misc_feature (2)..(9): Crosslink between residues
  MOD_RES (7)..(7): 2-aminoisobutyric acid
  MOD_RES (9)..(9): Alpha-Me S5-pentenyl-alanine olefin amino acid connected by an all-carbon crosslinker comprising one double bond
  MOD_RES (10)..(10): Norleucine
  C-term NH2
FAAYWEXLALA

SEQ ID NO: 1197 - protein, 11 aa, Artificial Sequence
  Description of Artificial Sequence: Synthetic peptide
  N-term Ac
  MOD_RES (2)..(2): Alpha-Me R8-octenyl-alanine olefin amino acid connected by an all-carbon crosslinker comprising one double bond
  misc_feature (2)..(9): Crosslink between residues
  MOD_RES (9)..(9): Alpha-Me S5-pentenyl-alanine olefin amino acid connected by an all-carbon crosslinker comprising one double bond
  MOD_RES (10)..(10): Norleucine
  C-term NH2
FAAYWEALALA

SEQ ID NO: 1198 - protein, 11 aa, Artificial Sequence
  Description of Artificial Sequence: Synthetic peptide
  N-term Ac
  MOD_RES (2)..(2): Alpha-Me R8-octenyl-alanine olefin amino acid connected by an all-carbon crosslinker comprising one double bond
  misc_feature (2)..(9): Crosslink between residues
  MOD_RES (7)..(7): Norleucine
  MOD_RES (9)..(9): Alpha-Me S5-pentenyl-alanine olefin amino acid connected by an all-carbon crosslinker comprising one double bond
  MOD_RES (10)..(10): Norleucine
  C-term NH2
FAAYWELLALA

SEQ ID NO: 1199 - protein, 10 aa, Artificial Sequence
  Description of Artificial Sequence: Synthetic peptide
  N-term Ac
  MOD_RES (2)..(2): Alpha-Me R8-octenyl-alanine olefin amino acid connected by an all-carbon crosslinker comprising one double bond
  misc_feature (2)..(9): Crosslink between residues
  MOD_RES (7)..(7): 2-aminoisobutyric acid
  MOD_RES (9)..(9): Alpha-Me S5-pentenyl-alanine olefin amino acid connected by an all-carbon crosslinker comprising one double bond
  MOD_RES (10)..(10): Abu
  C-term NH2
FAAYWEXLAX

SEQ ID NO: 1200 - protein, 10 aa, Artificial Sequence
  Description of Artificial Sequence: Synthetic peptide
  N-term Ac
  MOD_RES (2)..(2): Alpha-Me R8-octenyl-alanine olefin amino acid connected by an all-carbon crosslinker comprising one double bond
  misc_feature (2)..(9): Crosslink between residues
  MOD_RES (7)..(7): Norleucine
  MOD_RES (9)..(9): Alpha-Me S5-pentenyl-alanine olefin amino acid connected by an all-carbon crosslinker comprising one double bond
  MOD_RES (10)..(10): Abu
  C-term NH2
FAAYWELLAX

SEQ ID NO: 1201 - protein, 10 aa, Artificial Sequence
  Description of Artificial Sequence: Synthetic peptide
  N-term Ac
  MOD_RES (2)..(2): Alpha-Me R8-octenyl-alanine olefin amino acid connected by an all-carbon crosslinker comprising one double bond
  misc_feature (2)..(9): Crosslink between residues
  MOD_RES (9)..(9): Alpha-Me S5-pentenyl-alanine olefin amino acid connected by an all-carbon crosslinker comprising one double bond
  MOD_RES (10)..(10): Abu
  C-term NH2
FAAYWEALAX

SEQ ID NO: 1202 - protein, 12 aa, Artificial Sequence
  Description of Artificial Sequence: Synthetic peptide
  N-term Ac
  MOD_RES (4)..(4): Alpha-Me R8-octenyl-alanine olefin amino acid connected by an all-carbon crosslinker comprising one double bond
  misc_feature (4)..(11): Crosslink between residues
  MOD_RES (11)..(11): Alpha-Me S5-pentenyl-alanine olefin amino acid connected by an all-carbon crosslinker comprising one double bond
  C-term NH2
LTFAAFWAQLAS

SEQ ID NO: 1203 - protein, 12 aa, Artificial Sequence
  Description of Artificial Sequence: Synthetic peptide
  N-term Ac
  MOD_RES (4)..(4): Alpha-Me R8-octenyl-alanine olefin amino acid connected by an all-carbon crosslinker comprising one double bond
  misc_feature (4)..(11): Crosslink between residues
  MOD_RES (11)..(11): Alpha-Me S5-pentenyl-alanine olefin amino acid connected by an all-carbon crosslinker comprising one double bond
  C-term NH2
LTFAAWWAQLAS

SEQ ID NO: 1204 - protein, 12 aa, Artificial Sequence
  Description of Artificial Sequence: Synthetic peptide
  N-term Ac
  MOD_RES (4)..(4): Alpha-Me R8-octenyl-alanine olefin amino acid connected by an all-carbon crosslinker comprising one double bond
  misc_feature (4)..(11): Crosslink between residues
  MOD_RES (11)..(11): Alpha-Me S5-pentenyl-alanine olefin amino acid connected by an all-carbon crosslinker comprising one double bond
  C-term NH2
LTFAAYWAQIAS

SEQ ID NO: 1205 - protein, 12 aa, Artificial Sequence
  Description of Artificial Sequence: Synthetic peptide
  N-term Ac
  MOD_RES (4)..(4): Alpha-Me R8-octenyl-alanine olefin amino acid connected by an all-carbon crosslinker comprising one double bond
  misc_feature (4)..(11): Crosslink between residues
  MOD_RES (10)..(10): Norleucine
  MOD_RES (11)..(11): Alpha-Me S5-pentenyl-alanine olefin amino acid connected by an all-carbon crosslinker comprising one double bond
  C-term NH2
LTFAAYWAQLAS

SEQ ID NO: 1206 - protein, 13 aa, Artificial Sequence
  Description of Artificial Sequence: Synthetic peptide
  N-term Ac
  MOD_RES (4)..(4): Alpha-Me R8-octenyl-alanine olefin amino acid connected by an all-carbon crosslinker comprising one double bond
  misc_feature (4)..(11): Crosslink between residues
  MOD_RES (11)..(11): Alpha-Me S5-pentenyl-alanine olefin amino acid connected by an all-carbon crosslinker comprising one double bond
  C-term NH2
LTFAAYWAQLASA

SEQ ID NO: 1207 - protein, 12 aa, Artificial Sequence
  Description of Artificial Sequence: Synthetic peptide
  N-term Ac
  MOD_RES (4)..(4): Alpha-Me R8-octenyl-alanine olefin amino acid connected by an all-carbon crosslinker comprising one double bond
  misc_feature (4)..(11): Crosslink between residues
  MOD_RES (11)..(11): Alpha-Me S5-pentenyl-alanine olefin amino acid connected by an all-carbon crosslinker comprising one double bond
  C-term NH2
LTFAAWWAQLAA

SEQ ID NO: 1208 - protein, 12 aa, Artificial Sequence
  Description of Artificial Sequence: Synthetic peptide
  N-term Ac
  MOD_RES (4)..(4): Alpha-Me R8-octenyl-alanine olefin amino acid connected by an all-carbon crosslinker comprising one double bond
  misc_feature (4)..(11): Crosslink between residues
  MOD_RES (11)..(11): Alpha-Me S5-pentenyl-alanine olefin amino acid connected by an all-carbon crosslinker comprising one double bond
  C-term NH2
LTFAAYWAQIAA

SEQ ID NO: 1209 - protein, 12 aa, Artificial Sequence
  Description of Artificial Sequence: Synthetic peptide
  N-term Ac
  MOD_RES (4)..(4): Alpha-Me R8-octenyl-alanine olefin amino acid connected by an all-carbon crosslinker comprising one double bond
  misc_feature (4)..(11): Crosslink between residues
  MOD_RES (10)..(10): Norleucine
  MOD_RES (11)..(11): Alpha-Me S5-pentenyl-alanine olefin amino acid connected by an all-carbon crosslinker comprising one double bond
  C-term NH2
LTFAAYWAQLAA

SEQ ID NO: 1210 - protein, 13 aa, Artificial Sequence
  Description of Artificial Sequence: Synthetic peptide
  N-term Ac
  MOD_RES (4)..(4): Alpha-Me R8-octenyl-alanine olefin amino acid connected by an all-carbon crosslinker comprising one double bond
  misc_feature (4)..(11): Crosslink between residues
  MOD_RES (11)..(11): Alpha-Me S5-pentenyl-alanine olefin amino acid connected by an all-carbon crosslinker comprising one double bond
  C-term NH2
LTFAAYWAQLAAA

SEQ ID NO: 1211 - protein, 12 aa, Artificial Sequence
  Description of Artificial Sequence: Synthetic peptide
  N-term Ac
  MOD_RES (4)..(4): Alpha-Me R8-octenyl-alanine olefin amino acid connected by an all-carbon crosslinker comprising one double bond
  misc_feature (4)..(11): Crosslink between residues
  MOD_RES (11)..(11): Alpha-Me S5-pentenyl-alanine olefin amino acid connected by an all-carbon crosslinker comprising one double bond
  C-term NH2
LTFAHWWAQLAS

SEQ ID NO: 1212 - protein, 12 aa, Artificial Sequence
  Description of Artificial Sequence: Synthetic peptide
  N-term Ac
  MOD_RES (4)..(4): Alpha-Me R8-octenyl-alanine olefin amino acid connected by an all-carbon crosslinker comprising one double bond
  misc_feature (4)..(11): Crosslink between residues
  MOD_RES (11)..(11): Alpha-Me S5-pentenyl-alanine olefin amino acid connected by an all-carbon crosslinker comprising one double bond
  C-term NH2
LTFAHRWAQLAS

SEQ ID NO: 1213 - protein, 12 aa, Artificial Sequence
  Description of Artificial Sequence: Synthetic peptide
  N-term Ac
  MOD_RES (4)..(4): Alpha-Me R8-octenyl-alanine olefin amino acid connected by an all-carbon crosslinker comprising one double bond
  misc_feature (4)..(11): Crosslink between residues
  MOD_RES (11)..(11): Alpha-Me S5-pentenyl-alanine olefin amino acid connected by an all-carbon crosslinker comprising one double bond
  C-term NH2
LTFAHKWAQLAS

SEQ ID NO: 1214 - protein, 12 aa, Artificial Sequence
  Description of Artificial Sequence: Synthetic peptide
  N-term Ac
  MOD_RES (4)..(4): Alpha-Me R8-octenyl-alanine olefin amino acid connected by an all-carbon crosslinker comprising one double bond
  misc_feature (4)..(11): Crosslink between residues
  MOD_RES (11)..(11): Alpha-Me S5-pentenyl-alanine olefin amino acid connected by an all-carbon crosslinker comprising one double bond
  C-term NH2
LTFAHYWAQLAW

SEQ ID NO: 1215 - protein, 10 aa, Artificial Sequence
  Description of Artificial Sequence: Synthetic peptide
  N-term Ac
  MOD_RES (2)..(2): Alpha-Me R8-octenyl-alanine olefin amino acid connected by an all-carbon crosslinker comprising one double bond
  misc_feature (2)..(9): Crosslink between residues
  MOD_RES (6)..(6): Abu
  MOD_RES (9)..(9): Alpha-Me S5-pentenyl-alanine olefin amino acid connected by an all-carbon crosslinker comprising one double bond
  C-term NH2
FAAYWXALAA

SEQ ID NO: 1216 - protein, 10 aa, Artificial Sequence
  Description of Artificial Sequence: Synthetic peptide
  N-term Ac
  MOD_RES (2)..(2): Alpha-Me R8-octenyl-alanine olefin amino acid connected by an all-carbon crosslinker comprising one double bond
  misc_feature (2)..(9): Crosslink between residues
  MOD_RES (3)..(3): Abu
  MOD_RES (9)..(9): Alpha-Me S5-pentenyl-alanine olefin amino acid connected by an all-carbon crosslinker comprising one double bond
  C-term NH2
FAXYWEALAA

SEQ ID NO: 1217 - protein, 14 aa, Artificial Sequence
  Description of Artificial Sequence: Synthetic peptide
  N-term Ac
  MOD_RES (1)..(1): Norleucine
  MOD_RES (5)..(5): Alpha-Me R8-octenyl-alanine olefin amino acid connected by an all-carbon crosslinker comprising no double bonds
  misc_feature (5)..(12): Crosslink between residues
  MOD_RES (12)..(12): Alpha-Me S5-pentenyl-alanine olefin amino acid connected by an all-carbon crosslinker comprising no double bonds
  C-term NH2
LPRFANYWRLLAQN

SEQ ID NO: 1218 - protein, 12 aa, Artificial Sequence
  Description of Artificial Sequence: Synthetic peptide
  N-term Ac
  MOD_RES (4)..(4): Alpha-Me R8-octenyl-alanine olefin amino acid connected by an all-carbon crosslinker comprising no double bonds
  misc_feature (4)..(11): Crosslink between residues
  MOD_RES (11)..(11): Alpha-Me S5-pentenyl-alanine olefin amino acid connected by an all-carbon crosslinker comprising no double bonds
  C-term NH2
TSFAHYWAQLAS

SEQ ID NO: 1219 - protein, 12 aa, Artificial Sequence
  Description of Artificial Sequence: Synthetic peptide
  N-term Ac
  MOD_RES (4)..(4): Alpha-Me R8-octenyl-alanine olefin amino acid connected by an all-carbon crosslinker comprising no double bonds
  misc_feature (4)..(11): Crosslink between residues
  MOD_RES (11)..(11): Alpha-Me S5-pentenyl-alanine olefin amino acid connected by an all-carbon crosslinker comprising no double bonds
  C-term NH2
LTFAAYWAQLAS

SEQ ID NO: 1220 - protein, 12 aa, Artificial Sequence
  Description of Artificial Sequence: Synthetic peptide
  N-term Ac
  MOD_RES (4)..(4): Alpha-Me R8-octenyl-alanine olefin amino acid connected by an all-carbon crosslinker comprising one double bond
  misc_feature (4)..(11): Crosslink between residues
  MOD_RES (11)..(11): Alpha-Me S5-pentenyl-alanine olefin amino acid connected by an all-carbon crosslinker comprising one double bond
  C-term NH2
HTFAHYWAQLAS

SEQ ID NO: 1221 - protein, 12 aa, Artificial Sequence
  Description of Artificial Sequence: Synthetic peptide
  N-term Ac
  MOD_RES (4)..(4): Alpha-Me R8-octenyl-alanine olefin amino acid connected by an all-carbon crosslinker comprising one double bond
  misc_feature (4)..(11): Crosslink between residues
  MOD_RES (11)..(11): Alpha-Me S5-pentenyl-alanine olefin amino acid connected by an all-carbon crosslinker comprising one double bond
  C-term NH2
LHFAHYWAQLAS

SEQ ID NO: 1222 - protein, 12 aa, Artificial Sequence
  Description of Artificial Sequence: Synthetic peptide
  N-term Ac
  MOD_RES (4)..(4): Alpha-Me R8-octenyl-alanine olefin amino acid connected by an all-carbon crosslinker comprising one double bond
  misc_feature (4)..(11): Crosslink between residues
  MOD_RES (11)..(11): Alpha-Me S5-pentenyl-alanine olefin amino acid connected by an all-carbon crosslinker comprising one double bond
  C-term NH2
LTFAHHWAQLAS

SEQ ID NO: 1223 - protein, 12 aa, Artificial Sequence
  Description of Artificial Sequence: Synthetic peptide
  N-term Ac
  MOD_RES (4)..(4): Alpha-Me R8-octenyl-alanine olefin amino acid connected by an all-carbon crosslinker comprising one double bond
  misc_feature (4)..(11): Crosslink between residues
  MOD_RES (11)..(11): Alpha-Me S5-pentenyl-alanine olefin amino acid connected by an all-carbon crosslinker comprising one double bond
  C-term NH2
LTFAHYWHQLAS

SEQ ID NO: 1224 - protein, 12 aa, Artificial Sequence
  Description of Artificial Sequence: Synthetic peptide
  N-term Ac
  MOD_RES (4)..(4): Alpha-Me R8-octenyl-alanine olefin amino acid connected by an all-carbon crosslinker comprising one double bond
  misc_feature (4)..(11): Crosslink between residues
  MOD_RES (11)..(11): Alpha-Me S5-pentenyl-alanine olefin amino acid connected by an all-carbon crosslinker comprising one double bond
  C-term NH2
LTFAHYWAHLAS

SEQ ID NO: 1225 - protein, 12 aa, Artificial Sequence
  Description of Artificial Sequence: Synthetic peptide
  N-term Ac
  MOD_RES (4)..(4): Alpha-Me R8-octenyl-alanine olefin amino acid connected by an all-carbon crosslinker comprising one double bond
  misc_feature (4)..(11): Crosslink between residues
  MOD_RES (11)..(11): Alpha-Me S5-pentenyl-alanine olefin amino acid connected by an all-carbon crosslinker comprising one double bond
  C-term NH2
LTFAHYWAQLAH

SEQ ID NO: 1226 - protein, 12 aa, Artificial Sequence
  Description of Artificial Sequence: Synthetic peptide
  N-term Ac
  MOD_RES (4)..(4): Alpha-Me R8-octenyl-alanine olefin amino acid connected by an all-carbon crosslinker comprising one double bond
  misc_feature (4)..(11): Crosslink between residues
  MOD_RES (11)..(11): Alpha-Me S5-pentenyl-alanine olefin amino acid connected by an all-carbon crosslinker comprising one double bond
  C-term NHPr
LTFAHYWAQLAS

SEQ ID NO: 1227 - protein, 12 aa, Artificial Sequence
  Description of Artificial Sequence: Synthetic peptide
  N-term Ac
  MOD_RES (4)..(4): Alpha-Me R8-octenyl-alanine olefin amino acid connected by an all-carbon crosslinker comprising one double bond
  misc_feature (4)..(11): Crosslink between residues
  MOD_RES (11)..(11): Alpha-Me S5-pentenyl-alanine olefin amino acid connected by an all-carbon crosslinker comprising one double bond
  C-term NHsBu
LTFAHYWAQLAS

SEQ ID NO: 1228 - protein, 12 aa, Artificial Sequence
  Description of Artificial Sequence: Synthetic peptide
  N-term Ac
  MOD_RES (4)..(4): Alpha-Me R8-octenyl-alanine olefin amino acid connected by an all-carbon crosslinker comprising one double bond
  misc_feature (4)..(11): Crosslink between residues
  MOD_RES (11)..(11): Alpha-Me S5-pentenyl-alanine olefin amino acid connected by an all-carbon crosslinker comprising one double bond
  C-term NHiBu
LTFAHYWAQLAS

SEQ ID NO: 1229 - protein, 12 aa, Artificial Sequence
  Description of Artificial Sequence: Synthetic peptide
  N-term Ac
  MOD_RES (4)..(4): Alpha-Me R8-octenyl-alanine olefin amino acid connected by an all-carbon crosslinker comprising one double bond
  misc_feature (4)..(11): Crosslink between residues
  MOD_RES (11)..(11): Alpha-Me S5-pentenyl-alanine olefin amino acid connected by an all-carbon crosslinker comprising one double bond
  C-term NHBn
LTFAHYWAQLAS

SEQ ID NO: 1230 - protein, 12 aa, Artificial Sequence
  Description of Artificial Sequence: Synthetic peptide
  N-term Ac
  MOD_RES (4)..(4): Alpha-Me R8-octenyl-alanine olefin amino acid connected by an all-carbon crosslinker comprising one double bond
  misc_feature (4)..(11): Crosslink between residues
  MOD_RES (11)..(11): Alpha-Me S5-pentenyl-alanine olefin amino acid connected by an all-carbon crosslinker comprising one double bond
  C-term NHPe
LTFAHYWAQLAS

SEQ ID NO: 1231 - protein, 12 aa, Artificial Sequence
  Description of Artificial Sequence: Synthetic peptide
  N-term Ac
  MOD_RES (4)..(4): Alpha-Me R8-octenyl-alanine olefin amino acid connected by an all-carbon crosslinker comprising one double bond
  misc_feature (4)..(11): Crosslink between residues
  MOD_RES (11)..(11): Alpha-Me S5-pentenyl-alanine olefin amino acid connected by an all-carbon crosslinker comprising one double bond
  C-term NHChx
LTFAHYWAQLAS

SEQ ID NO: 1232 - protein, 12 aa, Artificial Sequence
  Description of Artificial Sequence: Synthetic peptide
  N-term Ac
  MOD_RES (4)..(4): Alpha-Me R8-octenyl-alanine olefin amino acid connected by an all-carbon crosslinker comprising one double bond
  misc_feature (4)..(11): Crosslink between residues
  MOD_RES (11)..(11): Alpha-Me S5-pentenyl-alanine olefin amino acid connected by an all-carbon crosslinker comprising one double bond
  C-term NH2
ETFAAYWAQLAS

SEQ ID NO: 1233 - protein, 12 aa, Artificial Sequence
  Description of Artificial Sequence: Synthetic peptide
  N-term Ac
  MOD_RES (4)..(4): Alpha-Me R8-octenyl-alanine olefin amino acid connected by an all-carbon crosslinker comprising one double bond
  misc_feature (4)..(11): Crosslink between residues
  MOD_RES (11)..(11): Alpha-Me S5-pentenyl-alanine olefin amino acid connected by an all-carbon crosslinker comprising one double bond
  C-term NH2
STFAAYWAQLAS

SEQ ID NO: 1234 - protein, 12 aa, Artificial Sequence
  Description of Artificial Sequence: Synthetic peptide
  N-term Ac
  MOD_RES (4)..(4): Alpha-Me R8-octenyl-alanine olefin amino acid connected by an all-carbon crosslinker comprising one double bond
  misc_feature (4)..(11): Crosslink between residues
  MOD_RES (11)..(11): Alpha-Me S5-pentenyl-alanine olefin amino acid connected by an all-carbon crosslinker comprising one double bond
  C-term NH2
LEFAAYWAQLAS

SEQ ID NO: 1235 - protein, 12 aa, Artificial Sequence
  Description of Artificial Sequence: Synthetic peptide
  N-term Ac
  MOD_RES (4)..(4): Alpha-Me R8-octenyl-alanine olefin amino acid connected by an all-carbon crosslinker comprising one double bond
  misc_feature (4)..(11): Crosslink between residues
  MOD_RES (11)..(11): Alpha-Me S5-pentenyl-alanine olefin amino acid connected by an all-carbon crosslinker comprising one double bond
  C-term NH2
LSFAAYWAQLAS

SEQ ID NO: 1236 - protein, 12 aa, Artificial Sequence
  Description of Artificial Sequence: Synthetic peptide
  N-term Ac
  MOD_RES (4)..(4): Alpha-Me R8-octenyl-alanine olefin amino acid connected by an all-carbon crosslinker comprising one double bond
  misc_feature (4)..(11): Crosslink between residues
  MOD_RES (11)..(11): Alpha-Me S5-pentenyl-alanine olefin amino acid connected by an all-carbon crosslinker comprising one double bond
  C-term NH2
LTFAEYWAQLAS

SEQ ID NO: 1237 - protein, 12 aa, Artificial Sequence
  Description of Artificial Sequence: Synthetic peptide
  N-term Ac
  MOD_RES (4)..(4): Alpha-Me R8-octenyl-alanine olefin amino acid connected by an all-carbon crosslinker comprising one double bond
  misc_feature (4)..(11): Crosslink between residues
  MOD_RES (11)..(11): Alpha-Me S5-pentenyl-alanine olefin amino acid connected by an all-carbon crosslinker comprising one double bond
  C-term NH2
LTFASYWAQLAS

SEQ ID NO: 1238 - protein, 12 aa, Artificial Sequence
  Description of Artificial Sequence: Synthetic peptide
  N-term Ac
  MOD_RES (4)..(4): Alpha-Me R8-octenyl-alanine olefin amino acid connected by an all-carbon crosslinker comprising one double bond
  misc_feature (4)..(11): Crosslink between residues
  MOD_RES (11)..(11): Alpha-Me S5-pentenyl-alanine olefin amino acid connected by an all-carbon crosslinker comprising one double bond
  C-term NH2
LTFAAYWEQLAS

SEQ ID NO: 1239 - protein, 12 aa, Artificial Sequence
  Description of Artificial Sequence: Synthetic peptide
  N-term Ac
  MOD_RES (4)..(4): Alpha-Me R8-octenyl-alanine olefin amino acid connected by an all-carbon crosslinker comprising one double bond
  misc_feature (4)..(11): Crosslink between residues
  MOD_RES (11)..(11): Alpha-Me S5-pentenyl-alanine olefin amino acid connected by an all-carbon crosslinker comprising one double bond
  C-term NH2
LTFAAYWAELAS

SEQ ID NO: 1240 - protein, 12 aa, Artificial Sequence
  Description of Artificial Sequence: Synthetic peptide
  N-term Ac
  MOD_RES (4)..(4): Alpha-Me R8-octenyl-alanine olefin amino acid connected by an all-carbon crosslinker comprising one double bond
  misc_feature (4)..(11): Crosslink between residues
  MOD_RES (11)..(11): Alpha-Me S5-pentenyl-alanine olefin amino acid connected by an all-carbon crosslinker comprising one double bond
  C-term NH2
LTFAAYWASLAS

SEQ ID NO: 1241 - protein, 12 aa, Artificial Sequence
  Description of Artificial Sequence: Synthetic peptide
  N-term Ac
  MOD_RES (4)..(4): Alpha-Me R8-octenyl-alanine olefin amino acid connected by an all-carbon crosslinker comprising one double bond
  misc_feature (4)..(11): Crosslink between residues
  MOD_RES (11)..(11): Alpha-Me S5-pentenyl-alanine olefin amino acid connected by an all-carbon crosslinker comprising one double bond
  C-term NH2
LTFAAYWAQLAE

SEQ ID NO: 1242 - protein, 12 aa, Artificial Sequence
  Description of Artificial Sequence: Synthetic peptide
  N-term Ac
  MOD_RES (3)..(3): Phe-2CN
  MOD_RES (4)..(4): Alpha-Me R8-octenyl-alanine olefin amino acid connected by an all-carbon crosslinker comprising one double bond
  misc_feature (4)..(11): Crosslink between residues
  MOD_RES (11)..(11): Alpha-Me S5-pentenyl-alanine olefin amino acid connected by an all-carbon crosslinker comprising one double bond
  C-term NH2
LTFAHYWAQLAS

SEQ ID NO: 1243 - protein, 12 aa, Artificial Sequence
  Description of Artificial Sequence: Synthetic peptide
  N-term Ac
  MOD_RES (3)..(3): 3-Chloro-Phe
  MOD_RES (4)..(4): Alpha-Me R8-octenyl-alanine olefin amino acid connected by an all-carbon crosslinker comprising one double bond
  misc_feature (4)..(11): Crosslink between residues
  MOD_RES (11)..(11): Alpha-Me S5-pentenyl-alanine olefin amino acid connected by an all-carbon crosslinker comprising one double bond
  C-term NH2
LTFAHYWAQLAS

SEQ ID NO: 1244 - protein, 12 aa, Artificial Sequence
  Description of Artificial Sequence: Synthetic peptide
  N-term Ac
  MOD_RES (3)..(3): 3,3-di-Phe
  MOD_RES (4)..(4): Alpha-Me R8-octenyl-alanine olefin amino acid connected by an all-carbon crosslinker comprising one double bond
  misc_feature (4)..(11): Crosslink between residues
  MOD_RES (11)..(11): Alpha-Me S5-pentenyl-alanine olefin amino acid connected by an all-carbon crosslinker comprising one double bond
  C-term NH2
LTXAHYWAQLAS

SEQ ID NO: 1245 - protein, 12 aa, Artificial Sequence
  Description of Artificial Sequence: Synthetic peptide
  N-term Ac
  MOD_RES (4)..(4): Alpha-Me R8-octenyl-alanine olefin amino acid connected by an all-carbon crosslinker comprising one double bond
  misc_feature (4)..(11): Crosslink between residues
  MOD_RES (10)..(10): Tert-butyl-Gly
  MOD_RES (11)..(11): Alpha-Me S5-pentenyl-alanine olefin amino acid connected by an all-carbon crosslinker comprising one double bond
  C-term NH2
LTFAHYWAQGAS

SEQ ID NO: 1246 - protein, 10 aa, Artificial Sequence
  Description of Artificial Sequence: Synthetic peptide
  N-term Ac
  MOD_RES (2)..(2): Alpha-Me R8-octenyl-alanine olefin amino acid connected by an all-carbon crosslinker comprising one double bond
  misc_feature (2)..(9): Crosslink between residues
  MOD_RES (5)..(5): 6cl-Trp
  MOD_RES (9)..(9): Alpha-Me S5-pentenyl-alanine olefin amino acid connected by an all-carbon crosslinker comprising one double bond
  C-term NH2
FAAYWEALAA

SEQ ID NO: 1247 - protein, 10 aa, Artificial Sequence
  Description of Artificial Sequence: Synthetic peptide
  N-term Ac
  MOD_RES (2)..(2): Alpha-Me R8-octenyl-alanine olefin amino acid connected by an all-carbon crosslinker comprising one double bond
  misc_feature (2)..(9): Crosslink between residues
  MOD_RES (5)..(5): dl6br-Trp
  MOD_RES (9)..(9): Alpha-Me S5-pentenyl-alanine olefin amino acid connected by an all-carbon crosslinker comprising one double bond
  C-term NH2
FAAYWEALAA

SEQ ID NO: 1248 - protein, 10 aa, Artificial Sequence
  Description of Artificial Sequence: Synthetic peptide
  N-term Ac
  MOD_RES (2)..(2): Alpha-Me R8-octenyl-alanine olefin amino acid connected by an all-carbon crosslinker comprising one double bond
  misc_feature (2)..(9): Crosslink between residues
  MOD_RES (5)..(5): dl6f-Trp
  MOD_RES (9)..(9): Alpha-Me S5-pentenyl-alanine olefin amino acid connected by an all-carbon crosslinker comprising one double bond
  C-term NH2
FAAYWEALAA

SEQ ID NO: 1249 - protein, 10 aa, Artificial Sequence
  Description of Artificial Sequence: Synthetic peptide
  N-term Ac
  MOD_RES (2)..(2): Alpha-Me R8-octenyl-alanine olefin amino acid connected by an all-carbon crosslinker comprising one double bond
  misc_feature (2)..(9): Crosslink between residues
  MOD_RES (5)..(5): dl4m-Trp
  MOD_RES (9)..(9): Alpha-Me S5-pentenyl-alanine olefin amino acid connected by an all-carbon crosslinker comprising one double bond
  C-term NH2
FAAYWEALAA

SEQ ID NO: 1250 - protein, 10 aa, Artificial Sequence
  Description of Artificial Sequence: Synthetic peptide
  N-term Ac
  MOD_RES (2)..(2): Alpha-Me R8-octenyl-alanine olefin amino acid connected by an all-carbon crosslinker comprising one double bond
  misc_feature (2)..(9): Crosslink between residues
  MOD_RES (5)..(5): dl5cl-Trp
  MOD_RES (9)..(9): Alpha-Me S5-pentenyl-alanine olefin amino acid connected by an all-carbon crosslinker comprising one double bond
  C-term NH2
FAAYWEALAA

SEQ ID NO: 1251 - protein, 10 aa, Artificial Sequence
  Description of Artificial Sequence: Synthetic peptide
  N-term Ac
  MOD_RES (2)..(2): Alpha-Me R8-octenyl-alanine olefin amino acid connected by an all-carbon crosslinker comprising one double bond
  misc_feature (2)..(9): Crosslink between residues
  MOD_RES (5)..(5): dl7m-Trp
  MOD_RES (9)..(9): Alpha-Me S5-pentenyl-alanine olefin amino acid connected by an all-carbon crosslinker comprising one double bond
  C-term NH2
FAAYWEALAA

SEQ ID NO: 1252 - protein, 12 aa, Artificial Sequence
  Description of Artificial Sequence: Synthetic peptide
  N-term Ac
  MOD_RES (4)..(4): Alpha-Me R8-octenyl-alanine olefin amino acid connected by an all-carbon crosslinker comprising no double bonds
  misc_feature (4)..(11): Crosslink between residues
  MOD_RES (11)..(11): Alpha-Me S5-pentenyl-alanine olefin amino acid connected by an all-carbon crosslinker comprising no double bonds
  C-term NH2
LTFAHYWAQLAA

SEQ ID NO: 1253 - protein, 12 aa, Artificial Sequence
  Description of Artificial Sequence: Synthetic peptide
  N-term Ac
  MOD_RES (4)..(4): Alpha-Me R8-octenyl-alanine olefin amino acid connected by an all-carbon crosslinker comprising one double bond
  misc_feature (4)..(11): Crosslink between residues
  MOD_RES (6)..(6): Cou
  MOD_RES (11)..(11): Alpha-Me S5-pentenyl-alanine olefin amino acid connected by an all-carbon crosslinker comprising one double bond
  C-term NH2
LTFAHXWAQLAS

SEQ ID NO: 1254 - protein, 12 aa, Artificial Sequence
  Description of Artificial Sequence: Synthetic peptide
  N-term Ac
  MOD_RES (6)..(6): Cou
  C-term NH2
LTFEHXWAQLTS

SEQ ID NO: 1255 - protein, 12 aa, Artificial Sequence
  Description of Artificial Sequence: Synthetic peptide
  N-term Ac
  MOD_RES (4)..(4): Alpha-Me R8-octenyl-alanine olefin amino acid connected by an all-carbon crosslinker comprising one double bond
  misc_feature (4)..(11): Crosslink between residues
  MOD_RES (6)..(6): Cou
  MOD_RES (11)..(11): Alpha-Me S5-pentenyl-alanine olefin amino acid connected by an all-carbon crosslinker comprising one double bond
  C-term NH2
LTAAHXWAQLAS

SEQ ID NO: 1256 - protein, 11 aa, Artificial Sequence
  Description of Artificial Sequence: Synthetic peptide
  N-term Ac
  MOD_RES (2)..(2): Alpha-Me R8-octenyl-alanine olefin amino acid connected by an all-carbon crosslinker comprising one double bond
  misc_feature (2)..(9): Crosslink between residues
  MOD_RES (9)..(9): Alpha-Me S5-pentenyl-alanine olefin amino acid connected by an all-carbon crosslinker comprising one double bond
  MOD_RES (10)..(10): Abu
  C-term NH2
FAAYWEALAXA

SEQ ID NO: 1257 - protein, 11 aa, Artificial Sequence
  Description of Artificial Sequence: Synthetic peptide
  N-term Ac
  MOD_RES (2)..(2): Alpha-Me R8-octenyl-alanine olefin amino acid connected by an all-carbon crosslinker comprising one double bond
  misc_feature (2)..(9): Crosslink between residues
  MOD_RES (9)..(9): Alpha-Me S5-pentenyl-alanine olefin amino acid connected by an all-carbon crosslinker comprising one double bond
  C-term NH2
FAAYWEAIAAA

SEQ ID NO: 1258 - protein, 11 aa, Artificial Sequence
  Description of Artificial Sequence: Synthetic peptide
  N-term Ac
  MOD_RES (2)..(2): Alpha-Me R8-octenyl-alanine olefin amino acid connected by an all-carbon crosslinker comprising one double bond
  misc_feature (2)..(9): Crosslink between residues
  MOD_RES (8)..(8): Norleucine
  MOD_RES (9)..(9): Alpha-Me S5-pentenyl-alanine olefin amino acid connected by an all-carbon crosslinker comprising one double bond
  C-term NH2
FAAYWEALAAA

SEQ ID NO: 1259 - protein, 11 aa, Artificial Sequence
  Description of Artificial Sequence: Synthetic peptide
  N-term Ac
  MOD_RES (2)..(2): Alpha-Me R8-octenyl-alanine olefin amino acid connected by an all-carbon crosslinker comprising one double bond
  misc_feature (2)..(9): Crosslink between residues
  MOD_RES (7)..(7): Alpha-Me-Leu
  MOD_RES (9)..(9): Alpha-Me S5-pentenyl-alanine olefin amino acid connected by an all-carbon crosslinker comprising one double bond
  C-term NH2
FAAYWELLAAA

SEQ ID NO: 1260 - protein, 11 aa, Artificial Sequence
  Description of Artificial Sequence: Synthetic peptide
  N-term Ac
  MOD_RES (2)..(2): Alpha-Me R8-octenyl-alanine olefin amino acid connected by an all-carbon crosslinker comprising one double bond
  misc_feature (2)..(9): Crosslink between residues
  MOD_RES (9)..(9): Alpha-Me S5-pentenyl-alanine olefin amino acid connected by an all-carbon crosslinker comprising one double bond
  C-term NH2
FAAYWQALAAA

SEQ ID NO: 1261 - protein, 11 aa, Artificial Sequence
  Description of Artificial Sequence: Synthetic peptide
  N-term Ac
  MOD_RES (2)..(2): Alpha-Me R8-octenyl-alanine olefin amino acid connected by an all-carbon crosslinker comprising one double bond
  misc_feature (2)..(9): Crosslink between residues
  MOD_RES (9)..(9): Alpha-Me S5-pentenyl-alanine olefin amino acid connected by an all-carbon crosslinker comprising one double bond
  C-term NH2
FAAYWAALAAA

SEQ ID NO: 1262 - protein, 11 aa, Artificial Sequence
  Description of Artificial Sequence: Synthetic peptide
  N-term Ac
  MOD_RES (2)..(2): Alpha-Me R8-octenyl-alanine olefin amino acid connected by an all-carbon crosslinker comprising one double bond
  misc_feature (2)..(9): Crosslink between residues
  MOD_RES (6)..(6): Abu
  MOD_RES (9)..(9): Alpha-Me S5-pentenyl-alanine olefin amino acid connected by an all-carbon crosslinker comprising one double bond
  C-term NH2
FAAYWXALAAA

SEQ ID NO: 1263 - protein, 11 aa, Artificial Sequence
  Description of Artificial Sequence: Synthetic peptide
  N-term Ac
  MOD_RES (2)..(2): Alpha-Me R8-octenyl-alanine olefin amino acid connected by an all-carbon crosslinker comprising one double bond
  misc_feature (2)..(9): Crosslink between residues
  MOD_RES (6)..(6): Norleucine
  MOD_RES (9)..(9): Alpha-Me S5-pentenyl-alanine olefin amino acid connected by an all-carbon crosslinker comprising one double bond
  C-term NH2
FAAYWLALAAA

SEQ ID NO: 1264 - protein, 11 aa, Artificial Sequence
  Description of Artificial Sequence: Synthetic peptide
  N-term Ac
  MOD_RES (2)..(2): Alpha-Me R8-octenyl-alanine olefin amino acid connected by an all-carbon crosslinker comprising one double bond
  misc_feature (2)..(9): Crosslink between residues
  MOD_RES (3)..(3): Abu
  MOD_RES (9)..(9): Alpha-Me S5-pentenyl-alanine olefin amino acid connected by an all-carbon crosslinker comprising one double bond
  C-term NH2
FAXYWEALAAA

SEQ ID NO: 1265 - protein, 11 aa, Artificial Sequence
  Description of Artificial Sequence: Synthetic peptide
  N-term Ac
  MOD_RES (2)..(2): Alpha-Me R8-octenyl-alanine olefin amino acid connected by an all-carbon crosslinker comprising one double bond
  misc_feature (2)..(9): Crosslink between residues
  MOD_RES (3)..(3): Norleucine
  MOD_RES (9)..(9): Alpha-Me S5-pentenyl-alanine olefin amino acid connected by an all-carbon crosslinker comprising one double bond
  C-term NH2
FALYWEALAAA

SEQ ID NO: 1266 - protein, 11 aa, Artificial Sequence
  Description of Artificial Sequence: Synthetic peptide
  N-term Ac
  MOD_RES (2)..(2): Alpha-Me R8-octenyl-alanine olefin amino acid connected by an all-carbon crosslinker comprising one double bond
  misc_feature (2)..(9): Crosslink between residues
  MOD_RES (9)..(9): Alpha-Me S5-pentenyl-alanine olefin amino acid connected by an all-carbon crosslinker comprising one double bond
  C-term NH2
FAFYWEALAAA

SEQ ID NO: 1267 - protein, 12 aa, Artificial Sequence
  Description of Artificial Sequence: Synthetic peptide
  N-term Ac
  MOD_RES (4)..(4): Alpha-Me R8-octenyl-alanine olefin amino acid connected by an all-carbon crosslinker comprising one double bond
  misc_feature (4)..(11): Crosslink between residues
  MOD_RES (10)..(10): hLeu
  MOD_RES (11)..(11): Alpha-Me S5-pentenyl-alanine olefin amino acid connected by an all-carbon crosslinker comprising one double bond
  C-term NH2
LTFAHYWAQLAS

SEQ ID NO: 1268 - protein, 12 aa, Artificial Sequence
  Description of Artificial Sequence: Synthetic peptide
  N-term Ac
  MOD_RES (4)..(4): Alpha-Me R8-octenyl-alanine olefin amino acid connected by an all-carbon crosslinker comprising one double bond
  misc_feature (4)..(11): Crosslink between residues
  MOD_RES (10)..(10): Adamantyl-Gly
  MOD_RES (11)..(11): Alpha-Me S5-pentenyl-alanine olefin amino acid connected by an all-carbon crosslinker comprising one double bond
  C-term NH2
LTFAHYWAQGAS

SEQ ID NO: 1269 - protein, 12 aa, Artificial Sequence
  Description of Artificial Sequence: Synthetic peptide
  N-term Ac
  MOD_RES (4)..(4): Alpha-Me R8-octenyl-alanine olefin amino acid connected by an all-carbon crosslinker comprising one double bond
  misc_feature (4)..(11): Crosslink between residues
  MOD_RES (10)..(10): Indanyl-Gly
  MOD_RES (11)..(11): Alpha-Me S5-pentenyl-alanine olefin amino acid connected by an all-carbon crosslinker comprising one double bond
  C-term NH2
LTFAHYWAQGAS

SEQ ID NO: 1270 - protein, 11 aa, Artificial Sequence
  Description of Artificial Sequence: Synthetic peptide
  N-term Ac
  MOD_RES (2)..(2): Alpha-Me R8-octenyl-alanine olefin amino acid connected by an all-carbon crosslinker comprising one double bond
  misc_feature (2)..(9): Crosslink between residues
  MOD_RES (9)..(9): Alpha-Me S5-pentenyl-alanine olefin amino acid connected by an all-carbon crosslinker comprising one double bond
  C-term NH2
FAAYWAQLAAA

SEQ ID NO: 1271 - protein, 12 aa, Artificial Sequence
  Description of Artificial Sequence: Synthetic peptide
  N-term Ac
  MOD_RES (4)..(4): Alpha-Me R8-octenyl-alanine olefin amino acid connected by an all-carbon crosslinker comprising one double bond
  misc_feature (4)..(11): Crosslink between residues
  MOD_RES (11)..(11): Alpha-Me S5-pentenyl-alanine olefin amino acid connected by an all-carbon crosslinker comprising one double bond
  C-term NH2
LTFAALWAQLAQ

SEQ ID NO: 1272 - protein, 11 aa, Artificial Sequence
  Description of Artificial Sequence: Synthetic peptide
  N-term Ac
  MOD_RES (2)..(2): Alpha-Me R8-octenyl-alanine olefin amino acid connected by an all-carbon crosslinker comprising one double bond
  misc_feature (2)..(9): Crosslink between residues
  MOD_RES (9)..(9): Alpha-Me S5-pentenyl-alanine olefin amino acid connected by an all-carbon crosslinker comprising one double bond
  C-term NH2
FAAYWEALAAA

SEQ ID NO: 1273 - protein, 11 aa, Artificial Sequence
  Description of Artificial Sequence: Synthetic peptide
  N-term Ac
  MOD_RES (2)..(2): Alpha-Me R8-octenyl-alanine olefin amino acid connected by an all-carbon crosslinker comprising one double bond
  misc_feature (2)..(9): Crosslink between residues
  MOD_RES (7)..(7): Norleucine
  MOD_RES (9)..(9): Alpha-Me S5-pentenyl-alanine olefin amino acid connected by an all-carbon crosslinker comprising one double bond
  C-term NH2
FAAYWELLAAA

SEQ ID NO: 1274 - protein, 10 aa, Artificial Sequence
  Description of Artificial Sequence: Synthetic peptide
  N-term Ac
  MOD_RES (2)..(2): Alpha-Me R8-octenyl-alanine olefin amino acid connected by an all-carbon crosslinker comprising one double bond
  misc_feature (2)..(9): Crosslink between residues
  MOD_RES (7)..(7): 2-aminoisobutyric acid
  MOD_RES (9)..(9): Alpha-Me S5-pentenyl-alanine olefin amino acid connected by an all-carbon crosslinker comprising one double bond
  MOD_RES (10)..(10): Abu
  C-term NH2
FAAYWEXLAX

SEQ ID NO: 1275 - protein, 10 aa, Artificial Sequence
  Description of Artificial Sequence: Synthetic peptide
  N-term Ac
  MOD_RES (2)..(2): Alpha-Me R8-octenyl-alanine olefin amino acid connected by an all-carbon crosslinker comprising one double bond
  misc_feature (2)..(9): Crosslink between residues
  MOD_RES (7)..(7): Norleucine
  MOD_RES (9)..(9): Alpha-Me S5-pentenyl-alanine olefin amino acid connected by an all-carbon crosslinker comprising one double bond
  MOD_RES (10)..(10): Abu
  C-term NH2
FAAYWELLAX

SEQ ID NO: 1276 - protein, 10 aa, Artificial Sequence
  Description of Artificial Sequence: Synthetic peptide
  N-term Ac
  MOD_RES (2)..(2): Alpha-Me R8-octenyl-alanine olefin amino acid connected by an all-carbon crosslinker comprising one double bond
  misc_feature (2)..(9): Crosslink between residues
  MOD_RES (9)..(9): Alpha-Me S5-pentenyl-alanine olefin amino acid connected by an all-carbon crosslinker comprising one double bond
  MOD_RES (10)..(10): Abu
  C-term NH2
FAAYWEALAX

SEQ ID NO: 1277 - protein, 11 aa, Artificial Sequence
  Description of Artificial Sequence: Synthetic peptide
  N-term Ac
  MOD_RES (2)..(2): Alpha-Me R8-octenyl-alanine olefin amino acid connected by an all-carbon crosslinker comprising one double bond
  misc_feature (2)..(9): Crosslink between residues
  MOD_RES (7)..(7): Ac3c
  MOD_RES (9)..(9): Alpha-Me S5-pentenyl-alanine olefin amino acid connected by an all-carbon crosslinker comprising one double bond
  MOD_RES (10)..(10): Abu
  C-term NH2
FAAYWEXLAXA

SEQ ID NO: 1278 - protein, 11 aa, Artificial Sequence
  Description of Artificial Sequence: Synthetic peptide
  N-term Ac
  MOD_RES (2)..(2): Alpha-Me R8-octenyl-alanine olefin amino acid connected by an all-carbon crosslinker comprising one double bond
  misc_feature (2)..(9): Crosslink between residues
  MOD_RES (7)..(7): Ac3c
  MOD_RES (9)..(9): Alpha-Me S5-pentenyl-alanine olefin amino acid connected by an all-carbon crosslinker comprising one double bond
  MOD_RES (10)..(10): Norleucine
  C-term NH2
FAAYWEXLALA

SEQ ID NO: 1279 - protein, 12 aa, Artificial Sequence
  Description of Artificial Sequence: Synthetic peptide
  N-term H
  MOD_RES (4)..(4): Alpha-Me R8-octenyl-alanine olefin amino acid connected by an all-carbon crosslinker comprising one double bond
  misc_feature (4)..(11): Crosslink between residues
  MOD_RES (11)..(11): Alpha-Me S5-pentenyl-alanine olefin amino acid connected by an all-carbon crosslinker comprising one double bond
  C-term NH2
LTFAAYWAQLAS

SEQ ID NO: 1280 - protein, 12 aa, Artificial Sequence
  Description of Artificial Sequence: Synthetic peptide
  N-term mdPEG3
  MOD_RES (4)..(4): Alpha-Me R8-octenyl-alanine olefin amino acid connected by an all-carbon crosslinker comprising one double bond
  misc_feature (4)..(11): Crosslink between residues
  MOD_RES (11)..(11): Alpha-Me S5-pentenyl-alanine olefin amino acid connected by an all-carbon crosslinker comprising one double bond
  C-term NH2
LTFAAYWAQLAS

SEQ ID NO: 1281 - protein, 12 aa, Artificial Sequence
  Description of Artificial Sequence: Synthetic peptide
  N-term mdPEG7
  MOD_RES (4)..(4): Alpha-Me R8-octenyl-alanine olefin amino acid connected by an all-carbon crosslinker comprising one double bond
  misc_feature (4)..(11): Crosslink between residues
  MOD_RES (11)..(11): Alpha-Me S5-pentenyl-alanine olefin amino acid connected by an all-carbon crosslinker comprising one double bond
  C-term NH2
LTFAAYWAQLAS

SEQ ID NO: 1282 - protein, 10 aa, Artificial Sequence
  Description of Artificial Sequence: Synthetic peptide
  N-term Ac
  MOD_RES (2)..(2): Alpha-Me R8-octenyl-alanine olefin amino acid connected by an all-carbon crosslinker comprising one double bond
  misc_feature (2)..(9): Crosslink between residues
  MOD_RES (4)..(4): Pmp
  MOD_RES (5)..(5): Et6cl-Trp
  MOD_RES (9)..(9): Alpha-Me S5-pentenyl-alanine olefin amino acid connected by an all-carbon crosslinker comprising one double bond
  C-term NH2
FAAXWEALAA

SEQ ID NO: 1283 - protein, 12 aa, Artificial Sequence
  Description of Artificial Sequence: Synthetic peptide
  N-term Ac
  MOD_RES (3)..(3): 3-Chloro-Phe
  MOD_RES (4)..(4): Alpha-Me R8-octenyl-alanine olefin amino acid connected by an all-carbon crosslinker comprising one double bond
  misc_feature (4)..(11): Crosslink between residues
  MOD_RES (11)..(11): Alpha-Me S5-pentenyl-alanine olefin amino acid connected by an all-carbon crosslinker comprising one double bond
  C-term NH2
LTFAAYWAQLAS

SEQ ID NO: 1284 - protein, 12 aa, Artificial Sequence
  Description of Artificial Sequence: Synthetic peptide
  N-term Ac
  MOD_RES (3)..(3): 3-Chloro-Phe
  MOD_RES (4)..(4): Alpha-Me R8-octenyl-alanine olefin amino acid connected by an all-carbon crosslinker comprising one double bond
  misc_feature (4)..(11): Crosslink between residues
  MOD_RES (11)..(11): Alpha-Me S5-pentenyl-alanine olefin amino acid connected by an all-carbon crosslinker comprising one double bond
  C-term NH2
LTFAHYWAQLAA

SEQ ID NO: 1285 - protein, 12 aa, Artificial Sequence
  Description of Artificial Sequence: Synthetic peptide
  N-term Ac
  MOD_RES (3)..(3): 3-Chloro-Phe
  MOD_RES (4)..(4): Alpha-Me R8-octenyl-alanine olefin amino acid connected by an all-carbon crosslinker comprising one double bond
  misc_feature (4)..(11): Crosslink between residues
  MOD_RES (11)..(11): Alpha-Me S5-pentenyl-alanine olefin amino acid connected by an all-carbon crosslinker comprising one double bond
  C-term NH2
LTFAHYWWQLAS

SEQ ID NO: 1286 - protein, 12 aa, Artificial Sequence
  Description of Artificial Sequence: Synthetic peptide
  N-term Ac
  MOD_RES (3)..(3): 3-Chloro-Phe
  MOD_RES (4)..(4): Alpha-Me R8-octenyl-alanine olefin amino acid connected by an all-carbon crosslinker comprising one double bond
  misc_feature (4)..(11): Crosslink between residues
  MOD_RES (11)..(11): Alpha-Me S5-pentenyl-alanine olefin amino acid connected by an all-carbon crosslinker comprising one double bond
  C-term NH2
LTFAAYWWQLAS

SEQ ID NO: 1287 - protein, 12 aa, Artificial Sequence
  Description of Artificial Sequence: Synthetic peptide
  N-term Ac
  MOD_RES (4)..(4): Alpha-Me R8-octenyl-alanine olefin amino acid connected by an all-carbon crosslinker comprising one double bond
  misc_feature (4)..(11): Crosslink between residues
  MOD_RES (11)..(11): Alpha-Me S5-pentenyl-alanine olefin amino acid connected by an all-carbon crosslinker comprising one double bond
  C-term NH2
LTFAAYWWQLAS

SEQ ID NO: 1288 - protein, 12 aa, Artificial Sequence
  Description of Artificial Sequence: Synthetic peptide
  N-term Ac
  MOD_RES (4)..(4): Alpha-Me R8-octenyl-alanine olefin amino acid connected by an all-carbon crosslinker comprising one double bond
  misc_feature (4)..(11): Crosslink between residues
  MOD_RES (11)..(11): Alpha-Me S5-pentenyl-alanine olefin amino acid connected by an all-carbon crosslinker comprising one double bond
  C-term NH2
LTFAHYWWQLAA

SEQ ID NO: 1289 - protein, 12 aa, Artificial Sequence
  Description of Artificial Sequence: Synthetic peptide
  N-term Ac
  MOD_RES (4)..(4): Alpha-Me R8-octenyl-alanine olefin amino acid connected by an all-carbon crosslinker comprising one double bond
  misc_feature (4)..(11): Crosslink between residues
  MOD_RES (11)..(11): Alpha-Me S5-pentenyl-alanine olefin amino acid connected by an all-carbon crosslinker comprising one double bond
  C-term NH2
LTFAAYWWQLAA

SEQ ID NO: 1290 - protein, 12 aa, Artificial Sequence
  Description of Artificial Sequence: Synthetic peptide
  N-term Ac
  MOD_RES (3)..(3): Phe-4F
  MOD_RES (4)..(4): Alpha-Me R8-octenyl-alanine olefin amino acid connected by an all-carbon crosslinker comprising one double bond
  misc_feature (4)..(11): Crosslink between residues
  MOD_RES (11)..(11): Alpha-Me S5-pentenyl-alanine olefin amino acid connected by an all-carbon crosslinker comprising one double bond
  C-term NH2
LTFAAYWAQLAS

SEQ ID NO: 1291 - protein, 12 aa, Artificial Sequence
  Description of Artificial Sequence: Synthetic peptide
  N-term Ac
  MOD_RES (3)..(3): 2-Fluoro-Phe
  MOD_RES (4)..(4): Alpha-Me R8-octenyl-alanine olefin amino acid connected by an all-carbon crosslinker comprising one double bond
  misc_feature (4)..(11): Crosslink between residues
  MOD_RES (11)..(11): Alpha-Me S5-pentenyl-alanine olefin amino acid connected by an all-carbon crosslinker comprising one double bond
  C-term NH2
LTFAAYWAQLAS

SEQ ID NO: 1292 - protein, 12 aa, Artificial Sequence
  Description of Artificial Sequence: Synthetic peptide
  N-term Ac
  MOD_RES (3)..(3): 3-fluoro-Phe
  MOD_RES (4)..(4): Alpha-Me R8-octenyl-alanine olefin amino acid connected by an all-carbon crosslinker comprising one double bond
  misc_feature (4)..(11): Crosslink between residues
  MOD_RES (11)..(11): Alpha-Me S5-pentenyl-alanine olefin amino acid connected by an all-carbon crosslinker comprising one double bond
  C-term NH2
LTFAAYWAQLAS

SEQ ID NO: 1293 - protein, 12 aa, Artificial Sequence
  Description of Artificial Sequence: Synthetic peptide
  N-term Ac
  MOD_RES (3)..(3): 3,4-difluoro Phe
  MOD_RES (4)..(4): Alpha-Me R8-octenyl-alanine olefin amino acid connected by an all-carbon crosslinker comprising one double bond
  misc_feature (4)..(11): Crosslink between residues
  MOD_RES (11)..(11): Alpha-Me S5-pentenyl-alanine olefin amino acid connected by an all-carbon crosslinker comprising one double bond
  C-term NH2
LTFAAYWAQLAS

SEQ ID NO: 1294 - protein, 12 aa, Artificial Sequence
  Description of Artificial Sequence: Synthetic peptide
  N-term Ac
  MOD_RES (3)..(3): 3,5-difluoro-Phe
  MOD_RES (4)..(4): Alpha-Me R8-octenyl-alanine olefin amino acid connected by an all-carbon crosslinker comprising one double bond
  misc_feature (4)..(11): Crosslink between residues
  MOD_RES (11)..(11): Alpha-Me S5-pentenyl-alanine olefin amino acid connected by an all-carbon crosslinker comprising one double bond
  C-term NH2
LTFAAYWAQLAS

SEQ ID NO: 1295 - protein, 10 aa, Artificial Sequence
  Description of Artificial Sequence: Synthetic peptide
  N-term Ac
  MOD_RES (1)..(1): 3-Chloro-Phe
  MOD_RES (2)..(2): Alpha-Me R8-octenyl-alanine olefin amino acid connected by an all-carbon crosslinker comprising one double bond
  misc_feature (2)..(9): Crosslink between residues
  MOD_RES (9)..(9): Alpha-Me S5-pentenyl-alanine olefin amino acid connected by an all-carbon crosslinker comprising one double bond
  C-term NH2
FAAYWEALAA

SEQ ID NO: 1296 - protein, 11 aa, Artificial Sequence
  Description of Artificial Sequence: Synthetic peptide
  N-term Ac
  MOD_RES (1)..(1): 3-Chloro-Phe
  MOD_RES (2)..(2): Alpha-Me R8-octenyl-alanine olefin amino acid connected by an all-carbon crosslinker comprising one double bond
  misc_feature (2)..(9): Crosslink between residues
  MOD_RES (9)..(9): Alpha-Me S5-pentenyl-alanine olefin amino acid connected by an all-carbon crosslinker comprising one double bond
  C-term NH2
FAAYWEALAAA

SEQ ID NO: 1297 - protein, 11 aa, Artificial Sequence
  Description of Artificial Sequence: Synthetic peptide
  N-term Ac
  MOD_RES (2)..(2): Alpha-Me R8-octenyl-alanine olefin amino acid connected by an all-carbon crosslinker comprising one double bond
  misc_feature (2)..(9): Crosslink between residues
  MOD_RES (5)..(5): 6cl-Trp
  MOD_RES (9)..(9): Alpha-Me S5-pentenyl-alanine olefin amino acid connected by an all-carbon crosslinker comprising one double bond
  C-term NH2
FAAYWEALAAA

SEQ ID NO: 1298 - protein, 9 aa, Artificial Sequence
  Description of Artificial Sequence: Synthetic peptide
  N-term Ac
  MOD_RES (2)..(2): Alpha-Me R8-octenyl-alanine olefin amino acid connected by an all-carbon crosslinker comprising one double bond
  misc_feature (2)..(9): Crosslink between residues
  MOD_RES (5)..(5): 6cl-Trp
  MOD_RES (9)..(9): Alpha-Me S5-pentenyl-alanine olefin amino acid connected by an all-carbon crosslinker comprising one double bond
  C-term NH2
FAAYWEALA

SEQ ID NO: 1299 - protein, 12 aa, Artificial Sequence
  Description of Artificial Sequence: Synthetic peptide
  N-term Ac
  MOD_RES (4)..(4): Alpha-Me R8-octenyl-alanine olefin amino acid connected by an all-carbon crosslinker comprising one double bond
  MOD_RES (11)..(11): Amino acid comprising two pentenyl-alanine olefin side chains that are not crosslinked
  C-term NH2
LTFAHYWAQLAS

SEQ ID NO: 1300 - protein, 12 aa, Artificial Sequence
  Description of Artificial Sequence: Synthetic peptide
  N-term Ac
  MOD_RES (4)..(4): Alpha-Me R8-octenyl-alanine olefin amino acid connected by an all-carbon crosslinker comprising one double bond
  misc_feature (4)..(11): Crosslink between residues
  MOD_RES (11)..(11): Alpha-Me S5-pentenyl-alanine olefin amino acid connected by an all-carbon crosslinker comprising one double bond
  C-term NHsBu
LTFAHYWAQLAS

SEQ ID NO: 1301 - protein, 12 aa, Artificial Sequence
  Description of Artificial Sequence: Synthetic peptide
  N-term Ac
  MOD_RES (4)..(4): Alpha-Me R8-octenyl-alanine olefin amino acid connected by an all-carbon crosslinker comprising one double bond
  misc_feature (4)..(11): Crosslink between residues
  MOD_RES (11)..(11): Alpha-Me S5-pentenyl-alanine olefin amino acid connected by an all-carbon crosslinker comprising one double bond
  C-term NH2
STFAAYWAQLAS

SEQ ID NO: 1302 - protein, 12 aa, Artificial Sequence
  Description of Artificial Sequence: Synthetic peptide
  N-term Ac
  MOD_RES (4)..(4): Alpha-Me R8-octenyl-alanine olefin amino acid connected by an all-carbon crosslinker comprising one double bond
  misc_feature (4)..(11): Crosslink between residues
  MOD_RES (11)..(11): Alpha-Me S5-pentenyl-alanine olefin amino acid connected by an all-carbon crosslinker comprising one double bond
  C-term NH2
LTFAAYWAELAS

SEQ ID NO: 1303 - protein, 12 aa, Artificial Sequence
  Description of Artificial Sequence: Synthetic peptide
  N-term Ac
  MOD_RES (4)..(4): Alpha-Me R8-octenyl-alanine olefin amino acid connected by an all-carbon crosslinker comprising one double bond
  misc_feature (4)..(11): Crosslink between residues
  MOD_RES (11)..(11): Alpha-Me S5-pentenyl-alanine olefin amino acid connected by an all-carbon crosslinker comprising one double bond
  C-term NH2
LTFAAYWAQLAE

SEQ ID NO: 1304 - protein, 12 aa, Artificial Sequence
  Description of Artificial Sequence: Synthetic peptide
  N-term mdPEG3
  MOD_RES (4)..(4): Alpha-Me R8-octenyl-alanine olefin amino acid connected by an all-carbon crosslinker comprising one double bond
  misc_feature (4)..(11): Crosslink between residues
  MOD_RES (11)..(11): Alpha-Me S5-pentenyl-alanine olefin amino acid connected by an all-carbon crosslinker comprising one double bond
  C-term NH2
LTFAAYWAQLAS

SEQ ID NO: 1305 - protein, 12 aa, Artificial Sequence
  Description of Artificial Sequence: Synthetic peptide
  N-term Ac
  MOD_RES (4)..(4): Alpha-Me R8-octenyl-alanine olefin amino acid connected by an all-carbon crosslinker comprising one double bond
  misc_feature (4)..(11): Crosslink between residues
  MOD_RES (10)..(10): hLeu
  MOD_RES (11)..(11): Alpha-Me S5-pentenyl-alanine olefin amino acid connected by an all-carbon crosslinker comprising one double bond
  C-term NH2
LTFAAYWAQLAS

SEQ ID NO: 1306 - protein, 12 aa, Artificial Sequence
  Description of Artificial Sequence: Synthetic peptide
  N-term Ac
  MOD_RES (4)..(4): Alpha-Me R8-octenyl-alanine olefin amino acid connected by an all-carbon crosslinker comprising one double bond
  misc_feature (4)..(11): Crosslink between residues
  MOD_RES (10)..(10): Cyclohexyl-Ala
  MOD_RES (11)..(11): Alpha-Me S5-pentenyl-alanine olefin amino acid connected by an all-carbon crosslinker comprising one double bond
  C-term NH2
LTFAAYWAQAAS

SEQ ID NO: 1307 - protein, 12 aa, Artificial Sequence
  Description of Artificial Sequence: Synthetic peptide
  N-term Ac
  MOD_RES (4)..(4): Alpha-Me R8-octenyl-alanine olefin amino acid connected by an all-carbon crosslinker comprising one double bond
  misc_feature (4)..(11): Crosslink between residues
  MOD_RES (10)..(10): Cyclohexyl-Gly
  MOD_RES (11)..(11): Alpha-Me S5-pentenyl-alanine olefin amino acid connected by an all-carbon crosslinker comprising one double bond
  C-term NH2
LTFAAYWAQGAS

SEQ ID NO: 1308 - protein, 12 aa, Artificial Sequence
  Description of Artificial Sequence: Synthetic peptide
  N-term Ac
  MOD_RES (4)..(4): Alpha-Me R8-octenyl-alanine olefin amino acid connected by an all-carbon crosslinker comprising one double bond
  misc_feature (4)..(11): Crosslink between residues
  MOD_RES (10)..(10): Cyclobutyl-Ala
  MOD_RES (11)..(11): Alpha-Me S5-pentenyl-alanine olefin amino acid connected by an all-carbon crosslinker comprising one double bond
  C-term NH2
LTFAAYWAQAAS

SEQ ID NO: 1309 - protein, 12 aa, Artificial Sequence
  Description of Artificial Sequence: Synthetic peptide
  N-term Ac
  MOD_RES (4)..(4): Alpha-Me R8-octenyl-alanine olefin amino acid connected by an all-carbon crosslinker comprising one double bond
  misc_feature (4)..(11): Crosslink between residues
  MOD_RES (11)..(11): Alpha-Me S5-pentenyl-alanine olefin amino acid connected by an all-carbon crosslinker comprising one double bond
  C-term NH2
LTFAAYWAQFAS

SEQ ID NO: 1310 - protein, 12 aa, Artificial Sequence
  Description of Artificial Sequence: Synthetic peptide
  N-term Ac
  MOD_RES (3)..(3): Phe-4F
  MOD_RES (4)..(4): Alpha-Me R8-octenyl-alanine olefin amino acid connected by an all-carbon crosslinker comprising one double bond
  misc_feature (4)..(11): Crosslink between residues
  MOD_RES (10)..(10): hLeu
  MOD_RES (11)..(11): Alpha-Me S5-pentenyl-alanine olefin amino acid connected by an all-carbon crosslinker comprising one double bond
  C-term NH2
LTFAHYWAQLAS

SEQ ID NO: 1311 - protein, 12 aa, Artificial Sequence
  Description of Artificial Sequence: Synthetic peptide
  N-term Ac
  MOD_RES (3)..(3): Phe-4F
  MOD_RES (4)..(4): Alpha-Me R8-octenyl-alanine olefin amino acid connected by an all-carbon crosslinker comprising one double bond
  misc_feature (4)..(11): Crosslink between residues
  MOD_RES (10)..(10): Cyclohexyl-Ala
  MOD_RES (11)..(11): Alpha-Me S5-pentenyl-alanine olefin amino acid connected by an all-carbon crosslinker comprising one double bond
  C-term NH2
LTFAHYWAQAAS

SEQ ID NO: 1312 - protein, 12 aa, Artificial Sequence
  Description of Artificial Sequence: Synthetic peptide
  N-term Ac
  MOD_RES (3)..(3): Phe-4F
  MOD_RES (4)..(4): Alpha-Me R8-octenyl-alanine olefin amino acid connected by an all-carbon crosslinker comprising one double bond
  misc_feature (4)..(11): Crosslink between residues
  MOD_RES (10)..(10): Cyclohexyl-Gly
  MOD_RES (11)..(11): Alpha-Me S5-pentenyl-alanine olefin amino acid connected by an all-carbon crosslinker comprising one double bond
  C-term NH2
LTFAHYWAQGAS

SEQ ID NO: 1313 - protein, 12 aa, Artificial Sequence
  Description of Artificial Sequence: Synthetic peptide
  N-term Ac
  MOD_RES (3)..(3): Phe-4F
  MOD_RES (4)..(4): Alpha-Me R8-octenyl-alanine olefin amino acid connected by an all-carbon crosslinker comprising one double bond
  misc_feature (4)..(11): Crosslink between residues
  MOD_RES (10)..(10): Cyclobutyl-Ala
  MOD_RES (11)..(11): Alpha-Me S5-pentenyl-alanine olefin amino acid connected by an all-carbon crosslinker comprising one double bond
  C-term NH2
LTFAHYWAQAAS

SEQ ID NO: 1314 - protein, 12 aa, Artificial Sequence
  Description of Artificial Sequence: Synthetic peptide
  N-term Ac
  MOD_RES (3)..(3): Phe-4F
  MOD_RES (4)..(4): Alpha-Me R8-octenyl-alanine olefin amino acid connected by an all-carbon crosslinker comprising one double bond
  misc_feature (4)..(11): Crosslink between residues
  MOD_RES (10)..(10): hLeu
  MOD_RES (11)..(11): Alpha-Me S5-pentenyl-alanine olefin amino acid connected by an all-carbon crosslinker comprising one double bond
  C-term NH2
LTFAAYWAQLAS

SEQ ID NO: 1315 - protein, 12 aa, Artificial Sequence
  Description of Artificial Sequence: Synthetic peptide
  N-term Ac
  MOD_RES (3)..(3): Phe-4F
  MOD_RES (4)..(4): Alpha-Me R8-octenyl-alanine olefin amino acid connected by an all-carbon crosslinker comprising one double bond
  misc_feature (4)..(11): Crosslink between residues
  MOD_RES (10)..(10): Cyclohexyl-Ala
  MOD_RES (11)..(11): Alpha-Me S5-pentenyl-alanine olefin amino acid connected by an all-carbon crosslinker comprising one double bond
  C-term NH2
LTFAAYWAQAAS

SEQ ID NO: 1316 - protein, 12 aa, Artificial Sequence
  Description of Artificial Sequence: Synthetic peptide
  N-term Ac
  MOD_RES (3)..(3): Phe-4F
  MOD_RES (4)..(4): Alpha-Me R8-octenyl-alanine olefin amino acid connected by an all-carbon crosslinker comprising one double bond
  misc_feature (4)..(11): Crosslink between residues
  MOD_RES (10)..(10): Cyclohexyl-Gly
  MOD_RES (11)..(11): Alpha-Me S5-pentenyl-alanine olefin amino acid connected by an all-carbon crosslinker comprising one double bond
  C-term NH2
LTFAAYWAQGAS

SEQ ID NO: 1317 - protein, 12 aa, Artificial Sequence
  Description of Artificial Sequence: Synthetic peptide
  N-term Ac
  MOD_RES (3)..(3): Phe-4F
  MOD_RES (4)..(4): Alpha-Me R8-octenyl-alanine olefin amino acid connected by an all-carbon crosslinker comprising one double bond
  misc_feature (4)..(11): Crosslink between residues
  MOD_RES (10)..(10): Cyclobutyl-Ala
  MOD_RES (11)..(11): Alpha-Me S5-pentenyl-alanine olefin amino acid connected by an all-carbon crosslinker comprising one double bond
  C-term NH2
LTFAAYWAQAAS

SEQ ID NO: 1318 - protein, 12 aa, Artificial Sequence
  Description of Artificial Sequence: Synthetic peptide
  N-term Ac
  MOD_RES (3)..(3): 3-Chloro-Phe
  MOD_RES (4)..(4): Alpha-Me R8-octenyl-alanine olefin amino acid connected by an all-carbon crosslinker comprising one double bond
  misc_feature (4)..(11): Crosslink between residues
  MOD_RES (10)..(10): hLeu
  MOD_RES (11)..(11): Alpha-Me S5-pentenyl-alanine olefin amino acid connected by an all-carbon crosslinker comprising one double bond
  C-term NH2
LTFAAYWAQLAS

SEQ ID NO: 1319 - protein, 12 aa, Artificial Sequence
  Description of Artificial Sequence: Synthetic peptide
  N-term Ac
  MOD_RES (3)..(3): 3-Chloro-Phe
  MOD_RES (4)..(4): Alpha-Me R8-octenyl-alanine olefin amino acid connected by an all-carbon crosslinker comprising one double bond
  misc_feature (4)..(11): Crosslink between residues
  MOD_RES (10)..(10): Cyclohexyl-Ala
  MOD_RES (11)..(11): Alpha-Me S5-pentenyl-alanine olefin amino acid connected by an all-carbon crosslinker comprising one double bond
  C-term NH2
LTFAAYWAQAAS

SEQ ID NO: 1320 - protein, 12 aa, Artificial Sequence
  Description of Artificial Sequence: Synthetic peptide
  N-term Ac
  MOD_RES (3)..(3): 3-Chloro-Phe
  MOD_RES (4)..(4): Alpha-Me R8-octenyl-alanine olefin amino acid connected by an all-carbon crosslinker comprising one double bond
  misc_feature (4)..(11): Crosslink between residues
  MOD_RES (10)..(10): Cyclohexyl-Gly
  MOD_RES (11)..(11): Alpha-Me S5-pentenyl-alanine olefin amino acid connected by an all-carbon crosslinker comprising one double bond
  C-term NH2
LTFAAYWAQGAS

SEQ ID NO: 1321 - protein, 12 aa, Artificial Sequence
  Description of Artificial Sequence: Synthetic peptide
  N-term Ac
  MOD_RES (3)..(3): 3-Chloro-Phe
  MOD_RES (4)..(4): Alpha-Me R8-octenyl-alanine olefin amino acid connected by an all-carbon crosslinker comprising one double bond
  misc_feature (4)..(11): Crosslink between residues
  MOD_RES (10)..(10): Cyclobutyl-Ala
  MOD_RES (11)..(11): Alpha-Me S5-pentenyl-alanine olefin amino acid connected by an all-carbon crosslinker comprising one double bond
  C-term NH2
LTFAAYWAQAAS

SEQ ID NO: 1322 - protein, 12 aa, Artificial Sequence
  Description of Artificial Sequence: Synthetic peptide
  N-term Ac
  MOD_RES (4)..(4): Alpha-Me R8-octenyl-alanine olefin amino acid connected by an all-carbon crosslinker comprising one double bond
  misc_feature (4)..(11): Crosslink between residues
  MOD_RES (10)..(10): homo-Phe
  MOD_RES (11)..(11): Alpha-Me S5-pentenyl-alanine olefin amino acid connected by an all-carbon crosslinker comprising one double bond
  C-term NH2
LTFAAYWAQFAS

SEQ ID NO: 1323 - protein, 12 aa, Artificial Sequence
  Description of Artificial Sequence: Synthetic peptide
  N-term Ac
  MOD_RES (4)..(4): Alpha-Me R8-octenyl-alanine olefin amino acid connected by an all-carbon crosslinker comprising one double bond
  misc_feature (4)..(11): Crosslink between residues
  MOD_RES (10)..(10): Phe-3CF3
  MOD_RES (11)..(11): Alpha-Me S5-pentenyl-alanine olefin amino acid connected by an all-carbon crosslinker comprising one double bond
  C-term NH2
LTFAAYWAQFAS

SEQ ID NO: 1324 - protein, 12 aa, Artificial Sequence
  Description of Artificial Sequence: Synthetic peptide
  N-term Ac
  MOD_RES (4)..(4): Alpha-Me R8-octenyl-alanine olefin amino acid connected by an all-carbon crosslinker comprising one double bond
  misc_feature (4)..(11): Crosslink between residues
  MOD_RES (10)..(10): Phe-3Me
  MOD_RES (11)..(11): Alpha-Me S5-pentenyl-alanine olefin amino acid connected by an all-carbon crosslinker comprising one double bond
  C-term NH2
LTFAAYWAQFAS

SEQ ID NO: 1325 - protein, 12 aa, Artificial Sequence
  Description of Artificial Sequence: Synthetic peptide
  N-term Ac
  MOD_RES (4)..(4): Alpha-Me R8-octenyl-alanine olefin amino acid connected by an all-carbon crosslinker comprising one double bond
  misc_feature (4)..(11): Crosslink between residues
  MOD_RES (10)..(10): 1-Naphthalanine
  MOD_RES (11)..(11): Alpha-Me S5-pentenyl-alanine olefin amino acid connected by an all-carbon crosslinker comprising one double bond
  C-term NH2
LTFAAYWAQAAS

SEQ ID NO: 1326 - protein, 12 aa, Artificial Sequence
  Description of Artificial Sequence: Synthetic peptide
  N-term Ac
  MOD_RES (4)..(4): Alpha-Me R8-octenyl-alanine olefin amino acid connected by an all-carbon crosslinker comprising one double bond
  misc_feature (4)..(11): Crosslink between residues
  MOD_RES (10)..(10): Bi-Phe
  MOD_RES (11)..(11): Alpha-Me S5-pentenyl-alanine olefin amino acid connected by an all-carbon crosslinker comprising one double bond
  C-term NH2
LTFAAYWAQFAS

SEQ ID NO: 1327 - protein, 12 aa, Artificial Sequence
  Description of Artificial Sequence: Synthetic peptide
  N-term Ac
  MOD_RES (4)..(4): Alpha-Me R8-octenyl-alanine olefin amino acid connected by an all-carbon crosslinker comprising one double bond
  misc_feature (4)..(11): Crosslink between residues
  MOD_RES (11)..(11): Alpha-Me S5-pentenyl-alanine olefin amino acid connected by an all-carbon crosslinker comprising one double bond
  C-term NH2
LTFAFYWAQLAA

SEQ ID NO: 1328 - protein, 12 aa, Artificial Sequence
  Description of Artificial Sequence: Synthetic peptide
  N-term Ac
  MOD_RES (4)..(4): Alpha-Me R8-octenyl-alanine olefin amino acid connected by an all-carbon crosslinker comprising one double bond
  misc_feature (4)..(11): Crosslink between residues
  MOD_RES (11)..(11): Alpha-Me S5-pentenyl-alanine olefin amino acid connected by an all-carbon crosslinker comprising one double bond
  C-term NHAm
LTFAHYWAQLAS

SEQ ID NO: 1329 - protein, 12 aa, Artificial Sequence
  Description of Artificial Sequence: Synthetic peptide
  N-term Ac
  MOD_RES (4)..(4): Alpha-Me R8-octenyl-alanine olefin amino acid connected by an all-carbon crosslinker comprising one double bond
  misc_feature (4)..(11): Crosslink between residues
  MOD_RES (11)..(11): Alpha-Me S5-pentenyl-alanine olefin amino acid connected by an all-carbon crosslinker comprising one double bond
  C-term NHiAm
LTFAHYWAQLAS

SEQ ID NO: 1330 - protein, 12 aa, Artificial Sequence
  Description of Artificial Sequence: Synthetic peptide
  N-term Ac
  MOD_RES (4)..(4): Alpha-Me R8-octenyl-alanine olefin amino acid connected by an all-carbon crosslinker comprising one double bond
  misc_feature (4)..(11): Crosslink between residues
  MOD_RES (11)..(11): Alpha-Me S5-pentenyl-alanine olefin amino acid connected by an all-carbon crosslinker comprising one double bond
  C-term NHnPr3Ph
LTFAHYWAQLAS

SEQ ID NO: 1331 - protein, 12 aa, Artificial Sequence
  Description of Artificial Sequence: Synthetic peptide
  N-term Ac
  MOD_RES (4)..(4): Alpha-Me R8-octenyl-alanine olefin amino acid connected by an all-carbon crosslinker comprising one double bond
  misc_feature (4)..(11): Crosslink between residues
  MOD_RES (11)..(11): Alpha-Me S5-pentenyl-alanine olefin amino acid connected by an all-carbon crosslinker comprising one double bond
  C-term NHnBu3,3Me
LTFAHYWAQLAS

SEQ ID NO: 1332 - protein, 12 aa, Artificial Sequence
  Description of Artificial Sequence: Synthetic peptide
  N-term Ac
  MOD_RES (4)..(4): Alpha-Me R8-octenyl-alanine olefin amino acid connected by an all-carbon crosslinker comprising one double bond
  misc_feature (4)..(11): Crosslink between residues
  MOD_RES (11)..(11): Alpha-Me S5-pentenyl-alanine olefin amino acid connected by an all-carbon crosslinker comprising one double bond
  C-term NHnPr
LTFAHYWAQLAS

SEQ ID NO: 1333 - protein, 12 aa, Artificial Sequence
  Description of Artificial Sequence: Synthetic peptide
  N-term Ac
  MOD_RES (4)..(4): Alpha-Me R8-octenyl-alanine olefin amino acid connected by an all-carbon crosslinker comprising one double bond
  misc_feature (4)..(11): Crosslink between residues
  MOD_RES (11)..(11): Alpha-Me S5-pentenyl-alanine olefin amino acid connected by an all-carbon crosslinker comprising one double bond
  C-term NHnEt2Ch
LTFAHYWAQLAS

SEQ ID NO: 1334 - protein, 12 aa, Artificial Sequence
  Description of Artificial Sequence: Synthetic peptide
  N-term Ac
  MOD_RES (4)..(4): Alpha-Me R8-octenyl-alanine olefin amino acid connected by an all-carbon crosslinker comprising one double bond
  misc_feature (4)..(11): Crosslink between residues
  MOD_RES (11)..(11): Alpha-Me S5-pentenyl-alanine olefin amino acid connected by an all-carbon crosslinker comprising one double bond
  C-term NHHex
LTFAHYWAQLAS

SEQ ID NO: 1335 - protein, 12 aa, Artificial Sequence
  Description of Artificial Sequence: Synthetic peptide
  N-term Ac
  MOD_RES (4)..(4): Alpha-Me R8-octenyl-alanine olefin amino acid connected by an all-carbon crosslinker comprising one double bond
  misc_feature (4)..(11): Crosslink between residues
  MOD_RES (11)..(11): Alpha-Me S5-pentenyl-alanine olefin amino acid connected by an all-carbon crosslinker comprising one double bond
  C-term NHmdPeg2
LTFAAYWAQLAS

SEQ ID NO: 1336 - protein, 12 aa, Artificial Sequence
  Description of Artificial Sequence: Synthetic peptide
  N-term Ac
  MOD_RES (4)..(4): Alpha-Me R8-octenyl-alanine olefin amino acid connected by an all-carbon crosslinker comprising one double bond
  misc_feature (4)..(11): Crosslink between residues
  MOD_RES (11)..(11): Alpha-Me S5-pentenyl-alanine olefin amino acid connected by an all-carbon crosslinker comprising one double bond
  C-term NHmdPeg2
LTFAAYWAQLAA

SEQ ID NO: 1337 - protein, 12 aa, Artificial Sequence
  Description of Artificial Sequence: Synthetic peptide
  N-term Ac
  MOD_RES (4)..(4): Alpha-Me R8-octenyl-alanine olefin amino acid connected by an all-carbon crosslinker comprising one double bond
  misc_feature (4)..(11): Crosslink between residues
  MOD_RES (11)..(11): Alpha-Me S5-pentenyl-alanine olefin amino acid connected by an all-carbon crosslinker comprising one double bond
  C-term NHmdPeg4
LTFAAYWAQLAA

SEQ ID NO: 1338 - protein, 10 aa, Artificial Sequence
  Description of Artificial Sequence: Synthetic peptide
  N-term Ac
  MOD_RES (2)..(2): Alpha-Me R8-octenyl-alanine olefin amino acid connected by an all-carbon crosslinker comprising one double bond
  misc_feature (2)..(9): Crosslink between residues
  MOD_RES (5)..(5): dl4m-Trp
  MOD_RES (9)..(9): Alpha-Me S5-pentenyl-alanine olefin amino acid connected by an all-carbon crosslinker comprising one double bond
  C-term NH2
FAAYWEALAA

SEQ ID NO: 1339 - protein, 10 aa, Artificial Sequence
  Description of Artificial Sequence: Synthetic peptide
  N-term Ac
  MOD_RES (2)..(2): Alpha-Me R8-octenyl-alanine olefin amino acid connected by an all-carbon crosslinker comprising one double bond
  misc_feature (2)..(9): Crosslink between residues
  MOD_RES (5)..(5): dl5cl-Trp
  MOD_RES (9)..(9): Alpha-Me S5-pentenyl-alanine olefin amino acid connected by an all-carbon crosslinker comprising one double bond
  C-term NH2
FAAYWEALAA

SEQ ID NO: 1340 - protein, 12 aa, Artificial Sequence
  Description of Artificial Sequence: Synthetic peptide
  N-term Ac
  MOD_RES (3)..(3): homo-Phe
  MOD_RES (4)..(4): Alpha-Me R8-octenyl-alanine olefin amino acid connected by an all-carbon crosslinker comprising one double bond
  misc_feature (4)..(11): Crosslink between residues
  MOD_RES (11)..(11): Alpha-Me S5-pentenyl-alanine olefin amino acid connected by an all-carbon crosslinker comprising one double bond
  C-term NH2
LTFAAYWAQLAS

SEQ ID NO: 1341 - protein, 12 aa, Artificial Sequence
  Description of Artificial Sequence: Synthetic peptide
  N-term Ac
  MOD_RES (3)..(3): 2-Naphthalanine
  MOD_RES (4)..(4): Alpha-Me R8-octenyl-alanine olefin amino acid connected by an all-carbon crosslinker comprising one double bond
  misc_feature (4)..(11): Crosslink between residues
  MOD_RES (11)..(11): Alpha-Me S5-pentenyl-alanine olefin amino acid connected by an all-carbon crosslinker comprising one double bond
  C-term NH2
LTAAAYWAQLAS

SEQ ID NO: 1342 - protein, 12 aa, Artificial Sequence
  Description of Artificial Sequence: Synthetic peptide
  N-term Ac
  MOD_RES (4)..(4): Alpha-Me R8-octenyl-alanine olefin amino acid connected by an all-carbon crosslinker comprising one double bond
  misc_feature (4)..(11): Crosslink between residues
  MOD_RES (11)..(11): Alpha-Me S5-pentenyl-alanine olefin amino acid connected by an all-carbon crosslinker comprising one double bond
  C-term NH2
LTAAAYWAQLAS

SEQ ID NO: 1343 - protein, 12 aa, Artificial Sequence
  Description of Artificial Sequence: Synthetic peptide
  N-term Ac
  MOD_RES (4)..(4): Alpha-Me R8-octenyl-alanine olefin amino acid connected by an all-carbon crosslinker comprising one double bond
  misc_feature (4)..(11): Crosslink between residues
  MOD_RES (11)..(11): Alpha-Me S5-pentenyl-alanine olefin amino acid connected by an all-carbon crosslinker comprising one double bond
  C-term NH2
LTFAAYWVQLAS

SEQ ID NO: 1344 - protein, 12 aa, Artificial Sequence
  Description of Artificial Sequence: Synthetic peptide
  N-term Ac
  MOD_RES (4)..(4): Alpha-Me R8-octenyl-alanine olefin amino acid connected by an all-carbon crosslinker comprising one double bond
  misc_feature (4)..(11): Crosslink between residues
  MOD_RES (11)..(11): Alpha-Me S5-pentenyl-alanine olefin amino acid connected by an all-carbon crosslinker comprising one double bond
  C-term NH2
LTFAHYWAALAA

SEQ ID NO: 1345 - protein, 12 aa, Artificial Sequence
  Description of Artificial Sequence: Synthetic peptide
  N-term Ac
  MOD_RES (4)..(4): Alpha-Me R8-octenyl-alanine olefin amino acid connected by an all-carbon crosslinker comprising one double bond
  misc_feature (4)..(11): Crosslink between residues
  MOD_RES (11)..(11): Alpha-Me S5-pentenyl-alanine olefin amino acid connected by an all-carbon crosslinker comprising one double bond
  C-term NH2
LTFAVYWAQLAA

SEQ ID NO: 1346 - protein, 12 aa, Artificial Sequence
  Description of Artificial Sequence: Synthetic peptide
  N-term Ac
  MOD_RES (4)..(4): Alpha-Me R8-octenyl-alanine olefin amino acid connected by an all-carbon crosslinker comprising one double bond
  misc_feature (4)..(11): Crosslink between residues
  MOD_RES (11)..(11): Alpha-Me S5-pentenyl-alanine olefin amino acid connected by an all-carbon crosslinker comprising one double bond
  C-term NH2
LTFAIYWAQLAS

SEQ ID NO: 1347 - protein, 12 aa, Artificial Sequence
  Description of Artificial Sequence: Synthetic peptide
  N-term Ac
  MOD_RES (4)..(4): Alpha-Me R8-octenyl-alanine olefin amino acid connected by an all-carbon crosslinker comprising one double bond
  misc_feature (4)..(11): Crosslink between residues
  MOD_RES (11)..(11): Alpha-Me S5-pentenyl-alanine olefin amino acid connected by an all-carbon crosslinker comprising one double bond
  C-term NH2
FTFAVYWSQLAS

SEQ ID NO: 1348 - protein, 12 aa, Artificial Sequence
  Description of Artificial Sequence: Synthetic peptide
  N-term Ac
  MOD_RES (4)..(4): Alpha-Me R8-octenyl-alanine olefin amino acid connected by an all-carbon crosslinker comprising one double bond
  misc_feature (4)..(11): Crosslink between residues
  MOD_RES (11)..(11): Alpha-Me S5-pentenyl-alanine olefin amino acid connected by an all-carbon crosslinker comprising one double bond
  C-term NH2
ITFAFYWAQLAS

SEQ ID NO: 1349 - protein, 12 aa, Artificial Sequence
  Description of Artificial Sequence: Synthetic peptide
  N-term Ac
  MOD_RES (1)..(1): 2-Naphthalanine
  MOD_RES (4)..(4): Alpha-Me R8-octenyl-alanine olefin amino acid connected by an all-carbon crosslinker comprising one double bond
  misc_feature (4)..(11): Crosslink between residues
  MOD_RES (11)..(11): Alpha-Me S5-pentenyl-alanine olefin amino acid connected by an all-carbon crosslinker comprising one double bond
  C-term NH2
ATFAVYWSQLAS

SEQ ID NO: 1350 - protein, 12 aa, Artificial Sequence
  Description of Artificial Sequence: Synthetic peptide
  N-term Ac
  MOD_RES (4)..(4): Alpha-Me R8-octenyl-alanine olefin amino acid connected by an all-carbon crosslinker comprising one double bond
  misc_feature (4)..(11): Crosslink between residues
  MOD_RES (11)..(11): Alpha-Me S5-pentenyl-alanine olefin amino acid connected by an all-carbon crosslinker comprising one double bond
  C-term NH2
ITFALYWSQLAS

SEQ ID NO: 1351 - protein, 12 aa, Artificial Sequence
  Description of Artificial Sequence: Synthetic peptide
  N-term Ac
  MOD_RES (4)..(4): Alpha-Me R8-octenyl-alanine olefin amino acid connected by an all-carbon crosslinker comprising one double bond
  misc_feature (4)..(11): Crosslink between residues
  MOD_RES (11)..(11): Alpha-Me S5-pentenyl-alanine olefin amino acid connected by an all-carbon crosslinker comprising one double bond
  C-term NH2
FTFAFYWAQLAS

SEQ ID NO: 1352 - protein, 12 aa, Artificial Sequence
  Description of Artificial Sequence: Synthetic peptide
  N-term Ac
  MOD_RES (4)..(4): Alpha-Me R8-octenyl-alanine olefin amino acid connected by an all-carbon crosslinker comprising one double bond
  misc_feature (4)..(11): Crosslink between residues
  MOD_RES (11)..(11): Alpha-Me S5-pentenyl-alanine olefin amino acid connected by an all-carbon crosslinker comprising one double bond
  C-term NH2
WTFAVYWAQLAS

SEQ ID NO: 1353 - protein, 12 aa, Artificial Sequence
  Description of Artificial Sequence: Synthetic peptide
  N-term Ac
  MOD_RES (4)..(4): Alpha-Me R8-octenyl-alanine olefin amino acid connected by an all-carbon crosslinker comprising one double bond
  misc_feature (4)..(11): Crosslink between residues
  MOD_RES (11)..(11): Alpha-Me S5-pentenyl-alanine olefin amino acid connected by an all-carbon crosslinker comprising one double bond
  C-term NH2
WTFAWYWAQLAS

SEQ ID NO: 1354 - protein, 12 aa, Artificial Sequence
  Description of Artificial Sequence: Synthetic peptide
  N-term Ac
  MOD_RES (4)..(4): Alpha-Me R8-octenyl-alanine olefin amino acid connected by an all-carbon crosslinker comprising one double bond
  misc_feature (4)..(11): Crosslink between residues
  MOD_RES (11)..(11): Alpha-Me S5-pentenyl-alanine olefin amino acid connected by an all-carbon crosslinker comprising one double bond
  C-term NH2
VTFAAYWSQLAS

SEQ ID NO: 1355 - protein, 12 aa, Artificial Sequence
  Description of Artificial Sequence: Synthetic peptide
  N-term Ac
  MOD_RES (4)..(4): Alpha-Me R8-octenyl-alanine olefin amino acid connected by an all-carbon crosslinker comprising one double bond
  misc_feature (4)..(11): Crosslink between residues
  MOD_RES (11)..(11): Alpha-Me S5-pentenyl-alanine olefin amino acid connected by an all-carbon crosslinker comprising one double bond
  C-term NH2
WTFAFYWSQLAS

SEQ ID NO: 1356 - protein, 12 aa, Artificial Sequence
  Description of Artificial Sequence: Synthetic peptide
  N-term Ac
  MOD_RES (4)..(4): Alpha-Me R8-octenyl-alanine olefin amino acid connected by an all-carbon crosslinker comprising one double bond
  misc_feature (4)..(11): Crosslink between residues
  MOD_RES (11)..(11): Alpha-Me S5-pentenyl-alanine olefin amino acid connected by an all-carbon crosslinker comprising one double bond
  C-term NH2
FTFAIYWAQLAS

SEQ ID NO: 1357 - protein, 12 aa, Artificial Sequence
  Description of Artificial Sequence: Synthetic peptide
  N-term Ac
  MOD_RES (4)..(4): Alpha-Me R8-octenyl-alanine olefin amino acid connected by an all-carbon crosslinker comprising one double bond
  misc_feature (4)..(11): Crosslink between residues
  MOD_RES (11)..(11): Alpha-Me S5-pentenyl-alanine olefin amino acid connected by an all-carbon crosslinker comprising one double bond
  C-term NH2
WTFAVYWSQLAS

SEQ ID NO: 1358 - protein, 12 aa, Artificial Sequence
  Description of Artificial Sequence: Synthetic peptide
  N-term Ac
  MOD_RES (4)..(4): Alpha-Me R8-octenyl-alanine olefin amino acid connected by an all-carbon crosslinker comprising one double bond
  misc_feature (4)..(11): Crosslink between residues
  MOD_RES (11)..(11): Alpha-Me S5-pentenyl-alanine olefin amino acid connected by an all-carbon crosslinker comprising one double bond
  C-term NH2
FTFALYWSQLAS

SEQ ID NO: 1359 - protein, 12 aa, Artificial Sequence
  Description of Artificial Sequence: Synthetic peptide
  N-term Ac
  MOD_RES (4)..(4): Alpha-Me R8-octenyl-alanine olefin amino acid connected by an all-carbon crosslinker comprising one double bond
  misc_feature (4)..(11): Crosslink between residues
  MOD_RES (11)..(11): Alpha-Me S5-pentenyl-alanine olefin amino acid connected by an all-carbon crosslinker comprising one double bond
  C-term NH2
YTFAFYWSQLAS

SEQ ID NO: 1360 - protein, 12 aa, Artificial Sequence
  Description of Artificial Sequence: Synthetic peptide
  N-term Ac
  MOD_RES (4)..(4): Alpha-Me R8-octenyl-alanine olefin amino acid connected by an all-carbon crosslinker comprising one double bond
  misc_feature (4)..(11): Crosslink between residues
  MOD_RES (7)..(7): 6cl-Trp
  MOD_RES (11)..(11): Alpha-Me S5-pentenyl-alanine olefin amino acid connected by an all-carbon crosslinker comprising one double bond
  C-term NH2
LTFAAYWEALAA

SEQ ID NO: 1361 - protein, 12 aa, Artificial Sequence
  Description of Artificial Sequence: Synthetic peptide
  N-term Ac
  MOD_RES (4)..(4): Alpha-Me R8-octenyl-alanine olefin amino acid connected by an all-carbon crosslinker comprising one double bond
  misc_feature (4)..(11): Crosslink between residues
  MOD_RES (7)..(7): 6cl-Trp
  MOD_RES (11)..(11): Alpha-Me S5-pentenyl-alanine olefin amino acid connected by an all-carbon crosslinker comprising one double bond
  C-term NH2
LTFAAYWSQLAS

SEQ ID NO: 1362 - protein, 10 aa, Artificial Sequence
  Description of Artificial Sequence: Synthetic peptide
  N-term Ac
  MOD_RES (2)..(2): Alpha-Me R8-octenyl-alanine olefin amino acid connected by an all-carbon crosslinker comprising one double bond
  misc_feature (2)..(9): Crosslink between residues
  MOD_RES (5)..(5): 6cl-Trp
  MOD_RES (9)..(9): Alpha-Me S5-pentenyl-alanine olefin amino acid connected by an all-carbon crosslinker comprising one double bond
  C-term NH2
FAAYWSALAA

SEQ ID NO: 1363 - protein, 11 aa, Artificial Sequence
  Description of Artificial Sequence: Synthetic peptide
  N-term Ac
  MOD_RES (2)..(2): Alpha-Me R8-octenyl-alanine olefin amino acid connected by an all-carbon crosslinker comprising one double bond
  misc_feature (2)..(9): Crosslink between residues
  MOD_RES (5)..(5): 6cl-Trp
  MOD_RES (9)..(9): Alpha-Me S5-pentenyl-alanine olefin amino acid connected by an all-carbon crosslinker comprising one double bond
  C-term NH2
FAAYWQALAAA

SEQ ID NO: 1364 - protein, 12 aa, Artificial Sequence
  Description of Artificial Sequence: Synthetic peptide
  N-term Ac
  MOD_RES (4)..(4): Alpha-Me R8-octenyl-alanine olefin amino acid connected by an all-carbon crosslinker comprising one double bond
  misc_feature (4)..(11): Crosslink between residues
  MOD_RES (11)..(11): Alpha-Me S5-pentenyl-alanine olefin amino acid connected by an all-carbon crosslinker comprising one double bond
  C-term NH2
LHFAAYWAQLAS

SEQ ID NO: 1365 - protein, 12 aa, Artificial Sequence
  Description of Artificial Sequence: Synthetic peptide
  N-term Ac
  MOD_RES (4)..(4): Alpha-Me R8-octenyl-alanine olefin amino acid connected by an all-carbon crosslinker comprising one double bond
  misc_feature (4)..(11): Crosslink between residues
  MOD_RES (11)..(11): Alpha-Me S5-pentenyl-alanine olefin amino acid connected by an all-carbon crosslinker comprising one double bond
  C-term NH2
LTFAAYWAQLAS

SEQ ID NO: 1366 - protein, 12 aa, Artificial Sequence
  Description of Artificial Sequence: Synthetic peptide
  N-term Ac
  MOD_RES (4)..(4): Alpha-Me R8-octenyl-alanine olefin amino acid connected by an all-carbon crosslinker comprising one double bond
  misc_feature (4)..(11): Crosslink between residues
  MOD_RES (11)..(11): Alpha-Me S5-pentenyl-alanine olefin amino acid connected by an all-carbon crosslinker comprising one double bond
  C-term NH2
LTFAAHWAQLAS

SEQ ID NO: 1367 - protein, 12 aa, Artificial Sequence
  Description of Artificial Sequence: Synthetic peptide
  N-term Ac
  MOD_RES (4)..(4): Alpha-Me R8-octenyl-alanine olefin amino acid connected by an all-carbon crosslinker comprising one double bond
  misc_feature (4)..(11): Crosslink between residues
  MOD_RES (11)..(11): Alpha-Me S5-pentenyl-alanine olefin amino acid connected by an all-carbon crosslinker comprising one double bond
  C-term NH2
LTFAAYWAHLAS

SEQ ID NO: 1368 - protein, 12 aa, Artificial Sequence
  Description of Artificial Sequence: Synthetic peptide
  N-term Ac
  MOD_RES (4)..(4): Alpha-Me R8-octenyl-alanine olefin amino acid connected by an all-carbon crosslinker comprising one double bond
  misc_feature (4)..(11): Crosslink between residues
  MOD_RES (11)..(11): Alpha-Me S5-pentenyl-alanine olefin amino acid connected by an all-carbon crosslinker comprising one double bond
  C-term NH2
LTFAAYWAQLAH

SEQ ID NO: 1369 - protein, 13 aa, Artificial Sequence
  Description of Artificial Sequence: Synthetic peptide
  MOD_RES (5)..(5): Alpha-Me R8-octenyl-alanine olefin amino acid connected by an all-carbon crosslinker comprising one double bond
  misc_feature (5)..(12): Crosslink between residues
  MOD_RES (12)..(12): Alpha-Me S5-pentenyl-alanine olefin amino acid connected by an all-carbon crosslinker comprising one double bond
  C-term NH2
HLTFAAYWAQLAA

SEQ ID NO: 1370 - protein, 12 aa, Artificial Sequence
  Description of Artificial Sequence: Synthetic peptide
  N-term Ac
  MOD_RES (4)..(4): Alpha-Me R8-octenyl-alanine olefin amino acid connected by an all-carbon crosslinker comprising one double bond
  misc_feature (4)..(11): Crosslink between residues
  MOD_RES (11)..(11): Alpha-Me S5-pentenyl-alanine olefin amino acid connected by an all-carbon crosslinker comprising one double bond
  C-term NH2
HHFAAYWAQLAS

SEQ ID NO: 1371 - protein, 14 aa, Artificial Sequence
  Description of Artificial Sequence: Synthetic peptide
  N-term Ac
  MOD_RES (1)..(1): D-amino acid
  MOD_RES (2)..(2): 2-aminoisobutyric acid
  MOD_RES (6)..(6): Alpha-Me R8-octenyl-alanine olefin amino acid connected by an all-carbon crosslinker comprising one double bond
  misc_feature (6)..(13): Crosslink between residues
  MOD_RES (13)..(13): Alpha-Me S5-pentenyl-alanine olefin amino acid connected by an all-carbon crosslinker comprising one double bond
  C-term NH2
AXWTFAVYWSQLAS

SEQ ID NO: 1372 - protein, 13 aa, Artificial Sequence
  Description of Artificial Sequence: Synthetic peptide
  N-term Ac
  MOD_RES (1)..(1): 2-aminoisobutyric acid
  MOD_RES (5)..(5): Alpha-Me R8-octenyl-alanine olefin amino acid connected by an all-carbon crosslinker comprising one double bond
  misc_feature (5)..(12): Crosslink between residues
  MOD_RES (12)..(12): Alpha-Me S5-pentenyl-alanine olefin amino acid connected by an all-carbon crosslinker comprising one double bond
  C-term NH2
XWTFAHYWAQLAS

SEQ ID NO: 1373 - protein, 14 aa, Artificial Sequence
  Description of Artificial Sequence: Synthetic peptide
  N-term Ac
  MOD_RES (1)..(1): 2-aminoisobutyric acid
  MOD_RES (6)..(6): Alpha-Me R8-octenyl-alanine olefin amino acid connected by an all-carbon crosslinker comprising one double bond
  misc_feature (6)..(13): Crosslink between residues
  MOD_RES (13)..(13): Alpha-Me S5-pentenyl-alanine olefin amino acid connected by an all-carbon crosslinker comprising one double bond
  C-term NH2
XAWTFAHYWAQLAS

SEQ ID NO: 1374 - protein, 13 aa, Artificial Sequence
  Description of Artificial Sequence: Synthetic peptide
  N-term Ac
  MOD_RES (1)..(1): D-amino acid
  MOD_RES (5)..(5): Alpha-Me R8-octenyl-alanine olefin amino acid connected by an all-carbon crosslinker comprising one double bond
  misc_feature (5)..(12): Crosslink between residues
  MOD_RES (12)..(12): Alpha-Me S5-pentenyl-alanine olefin amino acid connected by an all-carbon crosslinker comprising one double bond
  C-term NH2
FWTFAHYWAQLAS

SEQ ID NO: 1375 - protein, 14 aa, Artificial Sequence
  Description of Artificial Sequence: Synthetic peptide
  N-term Ac
  MOD_RES (1)..(1): 2-aminoisobutyric acid
  MOD_RES (6)..(6): Alpha-Me R8-octenyl-alanine olefin amino acid connected by an all-carbon crosslinker comprising one double bond
  misc_feature (6)..(13): Crosslink between residues
  MOD_RES (13)..(13): Alpha-Me S5-pentenyl-alanine olefin amino acid connected by an all-carbon crosslinker comprising one double bond
  C-term NH2
XWWTFAHYWAQLAS

SEQ ID NO: 1376 - protein, 12 aa, Artificial Sequence
  Description of Artificial Sequence: Synthetic peptide
  N-term Ac
  MOD_RES (4)..(4): Alpha-Me R8-octenyl-alanine olefin amino acid connected by an all-carbon crosslinker comprising one double bond
  misc_feature (4)..(11): Crosslink between residues
  MOD_RES (11)..(11): Alpha-Me S5-pentenyl-alanine olefin amino acid connected by an all-carbon crosslinker comprising one double bond
  C-term NH2
WTFALYWSQLAS

SEQ ID NO: 1377 - protein, 12 aa, Artificial Sequence
  Description of Artificial Sequence: Synthetic peptide
  N-term Ac
  MOD_RES (4)..(4): Alpha-Me R8-octenyl-alanine olefin amino acid connected by an all-carbon crosslinker comprising one double bond
  misc_feature (4)..(11): Crosslink between residues
  MOD_RES (5)..(5): Norleucine
  MOD_RES (11)..(11): Alpha-Me S5-pentenyl-alanine olefin amino acid connected by an all-carbon crosslinker comprising one double bond
  C-term NH2
WTFALYWSQLAS

SEQ ID NO: 1378 - protein, 12 aa, Artificial Sequence
  Description of Artificial Sequence: Synthetic peptide
  N-term Ac
  MOD_RES (4)..(4): Alpha-Me R8-octenyl-alanine olefin amino acid connected by an all-carbon crosslinker comprising one double bond
  misc_feature (4)..(11): Crosslink between residues
  MOD_RES (11)..(11): Alpha-Me S5-pentenyl-alanine olefin amino acid connected by an all-carbon crosslinker comprising one double bond
  MOD_RES (12)..(12): D-amino acid
  C-term NH2
LTFAAYWSQLAA

SEQ ID NO: 1379 - protein, 12 aa, Artificial Sequence
  Description of Artificial Sequence: Synthetic peptide
  N-term Ac
  MOD_RES (4)..(4): Alpha-Me R8-octenyl-alanine olefin amino acid connected by an all-carbon crosslinker comprising one double bond
  misc_feature (4)..(11): Crosslink between residues
  MOD_RES (11)..(11): Alpha-Me S5-pentenyl-alanine olefin amino acid connected by an all-carbon crosslinker comprising one double bond
  C-term NH2
LTFAEYWARLAA

SEQ ID NO: 1380 - protein, 12 aa, Artificial Sequence
  Description of Artificial Sequence: Synthetic peptide
  N-term Ac
  MOD_RES (4)..(4): Alpha-Me R8-octenyl-alanine olefin amino acid connected by an all-carbon crosslinker comprising one double bond
  misc_feature (4)..(11): Crosslink between residues
  MOD_RES (11)..(11): Alpha-Me S5-pentenyl-alanine olefin amino acid connected by an all-carbon crosslinker comprising one double bond
  C-term NH2
LTFAEYWAHLAA

SEQ ID NO: 1381 - protein, 12 aa, Artificial Sequence
  Description of Artificial Sequence: Synthetic peptide
  N-term Ac
  MOD_RES (1)..(1): D-amino acid
  MOD_RES (4)..(4): Alpha-Me R8-octenyl-alanine olefin amino acid connected by an all-carbon crosslinker comprising one double bond
  misc_feature (4)..(11): Crosslink between residues
  MOD_RES (11)..(11): Alpha-Me S5-pentenyl-alanine olefin amino acid connected by an all-carbon crosslinker comprising one double bond
  C-term NH2
ATFAAYWAQLAS

SEQ ID NO: 1382 - protein, 12 aa, Artificial Sequence
  Description of Artificial Sequence: Synthetic peptide
  N-term Ac
  MOD_RES (1)..(1): 2-aminoisobutyric acid
  MOD_RES (4)..(4): Alpha-Me R8-octenyl-alanine olefin amino acid connected by an all-carbon crosslinker comprising one double bond
  misc_feature (4)..(11): Crosslink between residues
  MOD_RES (11)..(11): Alpha-Me S5-pentenyl-alanine olefin amino acid connected by an all-carbon crosslinker comprising one double bond
  C-term NH2
XTFAAYWAQLAS

SEQ ID NO: 1383 - protein, 12 aa, Artificial Sequence
  Description of Artificial Sequence: Synthetic peptide
  N-term Ac
  MOD_RES (1)..(1): Alpha-Me-Phe
  MOD_RES (4)..(4): Alpha-Me R8-octenyl-alanine olefin amino acid connected by an all-carbon crosslinker comprising one double bond
  misc_feature (4)..(11): Crosslink between residues
  MOD_RES (11)..(11): Alpha-Me S5-pentenyl-alanine olefin amino acid connected by an all-carbon crosslinker comprising one double bond
  C-term NH2
FTFAAYWAQLAS

SEQ ID NO: 1384 - protein, 12 aa, Artificial Sequence
  Description of Artificial Sequence: Synthetic peptide
  N-term Ac
  MOD_RES (1)..(1): Alpha-Me-Trp
  MOD_RES (4)..(4): Alpha-Me R8-octenyl-alanine olefin amino acid connected by an all-carbon crosslinker comprising one double bond
  misc_feature (4)..(11): Crosslink between residues
  MOD_RES (11)..(11): Alpha-Me S5-pentenyl-alanine olefin amino acid connected by an all-carbon crosslinker comprising one double bond
  C-term NH2
WTFAAYWAQLAS

SEQ ID NO: 1385 - protein, 12 aa, Artificial Sequence
  Description of Artificial Sequence: Synthetic peptide
  N-term Ac
  MOD_RES (1)..(1): N-methyl-Leu
  MOD_RES (4)..(4): Alpha-Me R8-octenyl-alanine olefin amino acid connected by an all-carbon crosslinker comprising one double bond
  misc_feature (4)..(11): Crosslink between residues
  MOD_RES (11)..(11): Alpha-Me S5-pentenyl-alanine olefin amino acid connected by an all-carbon crosslinker comprising one double bond
  C-term NH2
LTFAAYWAQLAS

SEQ ID NO: 1386 - protein, 12 aa, Artificial Sequence
  Description of Artificial Sequence: Synthetic peptide
  N-term Ac
  MOD_RES (2)..(2): N-methyl-Thr
  MOD_RES (4)..(4): Alpha-Me R8-octenyl-alanine olefin amino acid connected by an all-carbon crosslinker comprising one double bond
  misc_feature (4)..(11): Crosslink between residues
  MOD_RES (11)..(11): Alpha-Me S5-pentenyl-alanine olefin amino acid connected by an all-carbon crosslinker comprising one double bond
  C-term NH2
LTFAAYWAQLAS

SEQ ID NO: 1387 - protein, 12 aa, Artificial Sequence
  Description of Artificial Sequence: Synthetic peptide
  N-term Ac
  MOD_RES (2)..(2): Sarcosine
  MOD_RES (4)..(4): Alpha-Me R8-octenyl-alanine olefin amino acid connected by an all-carbon crosslinker comprising one double bond
  misc_feature (4)..(11): Crosslink between residues
  MOD_RES (11)..(11): Alpha-Me S5-pentenyl-alanine olefin amino acid connected by an all-carbon crosslinker comprising one double bond
  C-term NH2
LXFAAYWAQLAS

SEQ ID NO: 1388 - protein, 12 aa, Artificial Sequence
  Description of Artificial Sequence: Synthetic peptide
  N-term Ac
  MOD_RES (4)..(4): Alpha-Me R8-octenyl-alanine olefin amino acid connected by an all-carbon crosslinker comprising one double bond
  misc_feature (4)..(11): Crosslink between residues
  MOD_RES (11)..(11): Alpha-Me S5-pentenyl-alanine olefin amino acid connected by an all-carbon crosslinker comprising one double bond
  C-term NH2
LGFAAYWAQLAS

SEQ ID NO: 1389 - protein, 12 aa, Artificial Sequence
  Description of Artificial Sequence: Synthetic peptide
  N-term Ac
  MOD_RES (3)..(3): N-methyl-Phe
  MOD_RES (4)..(4): Alpha-Me R8-octenyl-alanine olefin amino acid connected by an all-carbon crosslinker comprising one double bond
  misc_feature (4)..(11): Crosslink between residues
  MOD_RES (11)..(11): Alpha-Me S5-pentenyl-alanine olefin amino acid connected by an all-carbon crosslinker comprising one double bond
  C-term NH2
LTFAAYWAQLAS

SEQ ID NO: 1390 - protein, 11 aa, Artificial Sequence
  Description of Artificial Sequence: Synthetic peptide
  N-term Ac
  MOD_RES (3)..(3): Alpha-Me R8-octenyl-alanine olefin amino acid connected by an all-carbon crosslinker comprising one double bond
  misc_feature (3)..(10): Crosslink between residues
  MOD_RES (10)..(10): Alpha-Me S5-pentenyl-alanine olefin amino acid connected by an all-carbon crosslinker comprising one double bond
  C-term NH2
TFAAYWAQLAS

SEQ ID NO: 1391 - protein, 12 aa, Artificial Sequence
  Description of Artificial Sequence: Synthetic peptide
  N-term Ac
  MOD_RES (4)..(4): Alpha-Me R8-octenyl-alanine olefin amino acid connected by an all-carbon crosslinker comprising one double bond
  misc_feature (4)..(11): Crosslink between residues
  MOD_RES (11)..(11): Alpha-Me S5-pentenyl-alanine olefin amino acid connected by an all-carbon crosslinker comprising one double bond
  C-term NH2
ETFAAYWAQLAA

SEQ ID NO: 1392 - protein, 12 aa, Artificial Sequence
  Description of Artificial Sequence: Synthetic peptide
  N-term Ac
  MOD_RES (4)..(4): Alpha-Me R8-octenyl-alanine olefin amino acid connected by an all-carbon crosslinker comprising one double bond
  misc_feature (4)..(11): Crosslink between residues
  MOD_RES (11)..(11): Alpha-Me S5-pentenyl-alanine olefin amino acid connected by an all-carbon crosslinker comprising one double bond
  C-term NH2
LTFAEYWAQLAA

SEQ ID NO: 1393 - protein, 12 aa, Artificial Sequence
  Description of Artificial Sequence: Synthetic peptide
  N-term Ac
  MOD_RES (3)..(3): 2-Naphthalanine
  MOD_RES (4)..(4): Alpha-Me R8-octenyl-alanine olefin amino acid connected by an all-carbon crosslinker comprising one double bond
  misc_feature (4)..(11): Crosslink between residues
  MOD_RES (11)..(11): Alpha-Me S5-pentenyl-alanine olefin amino acid connected by an all-carbon crosslinker comprising one double bond
  C-term NH2
LTAAAYWSQLAS

SEQ ID NO: 1394 - protein, 12 aa, Artificial Sequence
  Description of Artificial Sequence: Synthetic peptide
  N-term Ac
  MOD_RES (4)..(4): Alpha-Me R8-octenyl-alanine olefin amino acid connected by an all-carbon crosslinker comprising one double bond
  misc_feature (4)..(11): Crosslink between residues
  MOD_RES (11)..(11): Alpha-Me S5-pentenyl-alanine olefin amino acid connected by an all-carbon crosslinker comprising one double bond
  C-term NH2
LTFAAYWAALAS

SEQ ID NO: 1395 - protein, 12 aa, Artificial Sequence
  Description of Artificial Sequence: Synthetic peptide
  N-term Ac
  MOD_RES (4)..(4): Alpha-Me R8-octenyl-alanine olefin amino acid connected by an all-carbon crosslinker comprising one double bond
  misc_feature (4)..(11): Crosslink between residues
  MOD_RES (10)..(10): homo-cyclohexyl-Ala
  MOD_RES (11)..(11): Alpha-Me S5-pentenyl-alanine olefin amino acid connected by an all-carbon crosslinker comprising one double bond
  C-term NH2
LTFAAYWAQAAS

SEQ ID NO: 1396 - protein, 12 aa, Artificial Sequence
  Description of Artificial Sequence: Synthetic peptide
  N-term Ac
  MOD_RES (4)..(4): Alpha-Me R8-octenyl-alanine olefin amino acid connected by an all-carbon crosslinker comprising one double bond
  misc_feature (4)..(11): Crosslink between residues
  MOD_RES (10)..(10): Cyclohexyl-Gly
  MOD_RES (11)..(11): Alpha-Me S5-pentenyl-alanine olefin amino acid connected by an all-carbon crosslinker comprising one double bond
  C-term NH2
LTFAAYWAQGAS

SEQ ID NO: 1397 - protein, 12 aa, Artificial Sequence
  Description of Artificial Sequence: Synthetic peptide
  N-term Ac
  MOD_RES (4)..(4): Alpha-Me R8-octenyl-alanine olefin amino acid connected by an all-carbon crosslinker comprising one double bond
  misc_feature (4)..(11): Crosslink between residues
  MOD_RES (10)..(10): Cyclobutyl-Ala
  MOD_RES (11)..(11): Alpha-Me S5-pentenyl-alanine olefin amino acid connected by an all-carbon crosslinker comprising one double bond
  C-term NH2
LTFAAYWAQAAS

SEQ ID NO: 1398 - protein, 12 aa, Artificial Sequence
  Description of Artificial Sequence: Synthetic peptide
  N-term Ac
  MOD_RES (4)..(4): Alpha-Me R8-octenyl-alanine olefin amino acid connected by an all-carbon crosslinker comprising one double bond
  misc_feature (4)..(11): Crosslink between residues
  MOD_RES (10)..(10): Phe-3CF3
  MOD_RES (11)..(11): Alpha-Me S5-pentenyl-alanine olefin amino acid connected by an all-carbon crosslinker comprising one double bond
  C-term NH2
LTFAAYWAQFAS

SEQ ID NO: 1399 - protein, 12 aa, Artificial Sequence
  Description of Artificial Sequence: Synthetic peptide
  N-term Ac
  MOD_RES (4)..(4): Alpha-Me R8-octenyl-alanine olefin amino acid connected by an all-carbon crosslinker comprising one double bond
  misc_feature (4)..(11): Crosslink between residues
  MOD_RES (10)..(10): 1-Naphthalanine
  MOD_RES (11)..(11): Alpha-Me S5-pentenyl-alanine olefin amino acid connected by an all-carbon crosslinker comprising one double bond
  C-term NH2
LTFAAYWAQAAS

SEQ ID NO: 1400 - protein, 12 aa, Artificial Sequence
  Description of Artificial Sequence: Synthetic peptide
  N-term Ac
  MOD_RES (4)..(4): Alpha-Me R8-octenyl-alanine olefin amino acid connected by an all-carbon crosslinker comprising one double bond
  misc_feature (4)..(11): Crosslink between residues
  MOD_RES (10)..(10): Bi-Phe
  MOD_RES (11)..(11): Alpha-Me S5-pentenyl-alanine olefin amino acid connected by an all-carbon crosslinker comprising one double bond
  C-term NH2
LTFAAYWAQFAS

SEQ ID NO: 1401 - protein, 12 aa, Artificial Sequence
  Description of Artificial Sequence: Synthetic peptide
  N-term Ac
  MOD_RES (3)..(3): 2-Naphthalanine
  MOD_RES (4)..(4): Alpha-Me R8-octenyl-alanine olefin amino acid connected by an all-carbon crosslinker comprising one double bond
  misc_feature (4)..(11): Crosslink between residues
  MOD_RES (11)..(11): Alpha-Me S5-pentenyl-alanine olefin amino acid connected by an all-carbon crosslinker comprising one double bond
  C-term NH2
LTAAAYWAQLAS

SEQ ID NO: 1402 - protein, 12 aa, Artificial Sequence
  Description of Artificial Sequence: Synthetic peptide
  N-term Ac
  MOD_RES (4)..(4): Alpha-Me R8-octenyl-alanine olefin amino acid connected by an all-carbon crosslinker comprising one double bond
  misc_feature (4)..(11): Crosslink between residues
  MOD_RES (11)..(11): Alpha-Me S5-pentenyl-alanine olefin amino acid connected by an all-carbon crosslinker comprising one double bond
  C-term NH2
LTFAAYWVQLAS

SEQ ID NO: 1403 - protein, 12 aa, Artificial Sequence
  Description of Artificial Sequence: Synthetic peptide
  N-term Ac
  MOD_RES (4)..(4): Alpha-Me R8-octenyl-alanine olefin amino acid connected by an all-carbon crosslinker comprising one double bond
  misc_feature (4)..(11): Crosslink between residues
  MOD_RES (11)..(11): Alpha-Me S5-pentenyl-alanine olefin amino acid connected by an all-carbon crosslinker comprising one double bond
  C-term NH2
LTFAAWWAQLAS

SEQ ID NO: 1404 - protein, 12 aa, Artificial Sequence
  Description of Artificial Sequence: Synthetic peptide
  N-term Ac
  MOD_RES (4)..(4): Alpha-Me R8-octenyl-alanine olefin amino acid connected by an all-carbon crosslinker comprising one double bond
  misc_feature (4)..(11): Crosslink between residues
  MOD_RES (11)..(11): Alpha-Me S5-pentenyl-alanine olefin amino acid connected by an all-carbon crosslinker comprising one double bond
  C-term NH2
FTFAVYWSQLAS

SEQ ID NO: 1405 - protein, 12 aa, Artificial Sequence
  Description of Artificial Sequence: Synthetic peptide
  N-term Ac
  MOD_RES (4)..(4): Alpha-Me R8-octenyl-alanine olefin amino acid connected by an all-carbon crosslinker comprising one double bond
  misc_feature (4)..(11): Crosslink between residues
  MOD_RES (11)..(11): Alpha-Me S5-pentenyl-alanine olefin amino acid connected by an all-carbon crosslinker comprising one double bond
  C-term NH2
ITFAFYWAQLAS

SEQ ID NO: 1406 - protein, 12 aa, Artificial Sequence
  Description of Artificial Sequence: Synthetic peptide
  N-term Ac
  MOD_RES (4)..(4): Alpha-Me R8-octenyl-alanine olefin amino acid connected by an all-carbon crosslinker comprising one double bond
  misc_feature (4)..(11): Crosslink between residues
  MOD_RES (11)..(11): Alpha-Me S5-pentenyl-alanine olefin amino acid connected by an all-carbon crosslinker comprising one double bond
  C-term NH2
ITFALYWSQLAS

SEQ ID NO: 1407 - protein, 12 aa, Artificial Sequence
  Description of Artificial Sequence: Synthetic peptide
  N-term Ac
  MOD_RES (4)..(4): Alpha-Me R8-octenyl-alanine olefin amino acid connected by an all-carbon crosslinker comprising one double bond
  misc_feature (4)..(11): Crosslink between residues
  MOD_RES (11)..(11): Alpha-Me S5-pentenyl-alanine olefin amino acid connected by an all-carbon crosslinker comprising one double bond
  C-term NH2
FTFAFYWAQLAS

SEQ ID NO: 1408 - protein, 12 aa, Artificial Sequence
  Description of Artificial Sequence: Synthetic peptide
  N-term Ac
  MOD_RES (4)..(4): Alpha-Me R8-octenyl-alanine olefin amino acid connected by an all-carbon crosslinker comprising one double bond
  misc_feature (4)..(11): Crosslink between residues
  MOD_RES (11)..(11): Alpha-Me S5-pentenyl-alanine olefin amino acid connected by an all-carbon crosslinker comprising one double bond
  C-term NH2
VTFAAYWSQLAS

SEQ ID NO: 1409 - protein, 12 aa, Artificial Sequence
  Description of Artificial Sequence: Synthetic peptide
  N-term Ac
  MOD_RES (4)..(4): Alpha-Me R8-octenyl-alanine olefin amino acid connected by an all-carbon crosslinker comprising one double bond
  misc_feature (4)..(11): Crosslink between residues
  MOD_RES (11)..(11): Alpha-Me S5-pentenyl-alanine olefin amino acid connected by an all-carbon crosslinker comprising one double bond
  C-term NH2
LTFAAHWAQLAS

SEQ ID NO: 1410 - protein, 12 aa, Artificial Sequence
  Description of Artificial Sequence: Synthetic peptide
  N-term Ac
  MOD_RES (4)..(4): Alpha-Me R8-octenyl-alanine olefin amino acid connected by an all-carbon crosslinker comprising one double bond
  misc_feature (4)..(11): Crosslink between residues
  MOD_RES (11)..(11): Alpha-Me S5-pentenyl-alanine olefin amino acid connected by an all-carbon crosslinker comprising one double bond
  C-term NH2
LTFAAYWAQLAH

SEQ ID NO: 1411 - protein, 12 aa, Artificial Sequence
  Description of Artificial Sequence: Synthetic peptide
  N-term Ac
  MOD_RES (4)..(4): Alpha-Me R8-octenyl-alanine olefin amino acid connected by an all-carbon crosslinker comprising one double bond
  misc_feature (4)..(11): Crosslink between residues
  MOD_RES (11)..(11): Alpha-Me S5-pentenyl-alanine olefin amino acid connected by an all-carbon crosslinker comprising one double bond
  C-term NH2
LTFAAYWAHLAS

SEQ ID NO: 1412 - protein, 14 aa, Artificial Sequence
  Description of Artificial Sequence: Synthetic peptide
  N-term Ac
  MOD_RES (1)..(1): D-amino acid
  MOD_RES (2)..(2): 2-aminoisobutyric acid
  MOD_RES (6)..(6): Alpha-Me R8-octenyl-alanine olefin amino acid connected by an all-carbon crosslinker comprising one double bond
  misc_feature (6)..(13): Crosslink between residues
  MOD_RES (13)..(13): Alpha-Me S5-pentenyl-alanine olefin amino acid connected by an all-carbon crosslinker comprising one double bond
  C-term NH2
AXWTFAVYWSQLAS

SEQ ID NO: 1413 - protein, 13 aa, Artificial Sequence
  Description of Artificial Sequence: Synthetic peptide
  N-term Ac
  MOD_RES (1)..(1): 2-aminoisobutyric acid
  MOD_RES (5)..(5): Alpha-Me R8-octenyl-alanine olefin amino acid connected by an all-carbon crosslinker comprising one double bond
  misc_feature (5)..(12): Crosslink between residues
  MOD_RES (12)..(12): Alpha-Me S5-pentenyl-alanine olefin amino acid connected by an all-carbon crosslinker comprising one double bond
  C-term NH2
XWTFAHYWAQLAS

SEQ ID NO: 1414 - protein, 14 aa, Artificial Sequence
  Description of Artificial Sequence: Synthetic peptide
  N-term Ac
  MOD_RES (1)..(1): 2-aminoisobutyric acid
  MOD_RES (6)..(6): Alpha-Me R8-octenyl-alanine olefin amino acid connected by an all-carbon crosslinker comprising one double bond
  misc_feature (6)..(13): Crosslink between residues
  MOD_RES (13)..(13): Alpha-Me S5-pentenyl-alanine olefin amino acid connected by an all-carbon crosslinker comprising one double bond
  C-term NH2
XAWTFAHYWAQLAS

SEQ ID NO: 1415 - protein, 13 aa, Artificial Sequence
  Description of Artificial Sequence: Synthetic peptide
  N-term Ac
  MOD_RES (1)..(1): D-amino acid
  MOD_RES (5)..(5): Alpha-Me R8-octenyl-alanine olefin amino acid connected by an all-carbon crosslinker comprising one double bond
  misc_feature (5)..(12): Crosslink between residues
  MOD_RES (12)..(12): Alpha-Me S5-pentenyl-alanine olefin amino acid connected by an all-carbon crosslinker comprising one double bond
  C-term NH2
FWTFAHYWAQLAS

SEQ ID NO: 1416 - protein, 14 aa, Artificial Sequence
  Description of Artificial Sequence: Synthetic peptide
  N-term Ac
  MOD_RES (1)..(1): 2-aminoisobutyric acid
  MOD_RES (6)..(6): Alpha-Me R8-octenyl-alanine olefin amino acid connected by an all-carbon crosslinker comprising one double bond
  misc_feature (6)..(13): Crosslink between residues
  MOD_RES (13)..(13): Alpha-Me S5-pentenyl-alanine olefin amino acid connected by an all-carbon crosslinker comprising one double bond
  C-term NH2
XWWTFAHYWAQLAS

SEQ ID NO: 1417 - protein, 12 aa, Artificial Sequence
  Description of Artificial Sequence: Synthetic peptide
  N-term Ac
  MOD_RES (4)..(4): Alpha-Me R8-octenyl-alanine olefin amino acid connected by an all-carbon crosslinker comprising one double bond
  misc_feature (4)..(11): Crosslink between residues
  MOD_RES (11)..(11): Alpha-Me S5-pentenyl-alanine olefin amino acid connected by an all-carbon crosslinker comprising one double bond
  C-term NH2
WTFALYWSQLAS

SEQ ID NO: 1418 - protein, 12 aa, Artificial Sequence
  Description of Artificial Sequence: Synthetic peptide
  N-term Ac
  MOD_RES (4)..(4): Alpha-Me R8-octenyl-alanine olefin amino acid connected by an all-carbon crosslinker comprising one double bond
  misc_feature (4)..(11): Crosslink between residues
  MOD_RES (5)..(5): Norleucine
  MOD_RES (11)..(11): Alpha-Me S5-pentenyl-alanine olefin amino acid connected by an all-carbon crosslinker comprising one double bond
  C-term NH2
WTFALYWSQLAS

SEQ ID NO: 1419 - protein, 12 aa, Artificial Sequence
  Description of Artificial Sequence: Synthetic peptide
  N-term Ac
  MOD_RES (4)..(4): Alpha-Me R8-octenyl-alanine olefin amino acid connected by an all-carbon crosslinker comprising one double bond
  misc_feature (4)..(11): Crosslink between residues
  MOD_RES (11)..(11): Alpha-Me S5-pentenyl-alanine olefin amino acid connected by an all-carbon crosslinker comprising one double bond
  MOD_RES (12)..(12): D-amino acid
  C-term NH2
LTFAAYWSQLAA

SEQ ID NO: 1420 - protein, 12 aa, Artificial Sequence
  Description of Artificial Sequence: Synthetic peptide
  N-term Ac
  MOD_RES (4)..(4): Alpha-Me R8-octenyl-alanine olefin amino acid connected by an all-carbon crosslinker comprising one double bond
  misc_feature (4)..(11): Crosslink between residues
  MOD_RES (11)..(11): Alpha-Me S5-pentenyl-alanine olefin amino acid connected by an all-carbon crosslinker comprising one double bond
  C-term NH2
LTFAEYWARLAA

SEQ ID NO: 1421 - protein, 12 aa, Artificial Sequence
  Description of Artificial Sequence: Synthetic peptide
  N-term Ac
  MOD_RES (4)..(4): Alpha-Me R8-octenyl-alanine olefin amino acid connected by an all-carbon crosslinker comprising one double bond
  misc_feature (4)..(11): Crosslink between residues
  MOD_RES (11)..(11): Alpha-Me S5-pentenyl-alanine olefin amino acid connected by an all-carbon crosslinker comprising one double bond
  C-term NH2
LTFAEYWAHLAA

SEQ ID NO: 1422 - protein, 12 aa, Artificial Sequence
  Description of Artificial Sequence: Synthetic peptide
  N-term Ac
  MOD_RES (1)..(1): D-amino acid
  MOD_RES (4)..(4): Alpha-Me R8-octenyl-alanine olefin amino acid connected by an all-carbon crosslinker comprising one double bond
  misc_feature (4)..(11): Crosslink between residues
  MOD_RES (11)..(11): Alpha-Me S5-pentenyl-alanine olefin amino acid connected by an all-carbon crosslinker comprising one double bond
  C-term NH2
ATFAAYWAQLAS

SEQ ID NO: 1423 - protein, 12 aa, Artificial Sequence
  Description of Artificial Sequence: Synthetic peptide
  N-term Ac
  MOD_RES (1)..(1): 2-aminoisobutyric acid
  MOD_RES (4)..(4): Alpha-Me R8-octenyl-alanine olefin amino acid connected by an all-carbon crosslinker comprising one double bond
  misc_feature (4)..(11): Crosslink between residues
  MOD_RES (11)..(11): Alpha-Me S5-pentenyl-alanine olefin amino acid connected by an all-carbon crosslinker comprising one double bond
  C-term NH2
XTFAAYWAQLAS

SEQ ID NO: 1424 - protein, 12 aa, Artificial Sequence
  Description of Artificial Sequence: Synthetic peptide
  N-term Ac
  MOD_RES (1)..(1): Alpha-Me-Phe
  MOD_RES (4)..(4): Alpha-Me R8-octenyl-alanine olefin amino acid connected by an all-carbon crosslinker comprising one double bond
  misc_feature (4)..(11): Crosslink between residues
  MOD_RES (11)..(11): Alpha-Me S5-pentenyl-alanine olefin amino acid connected by an all-carbon crosslinker comprising one double bond
  C-term NH2
FTFAAYWAQLAS

SEQ ID NO: 1425 - protein, 12 aa, Artificial Sequence
  Description of Artificial Sequence: Synthetic peptide
  N-term Ac
  MOD_RES (1)..(1): Alpha-Me-Trp
  MOD_RES (4)..(4): Alpha-Me R8-octenyl-alanine olefin amino acid connected by an all-carbon crosslinker comprising one double bond
  misc_feature (4)..(11): Crosslink between residues
  MOD_RES (11)..(11): Alpha-Me S5-pentenyl-alanine olefin amino acid connected by an all-carbon crosslinker comprising one double bond
  C-term NH2
WTFAAYWAQLAS

SEQ ID NO: 1426 - protein, 12 aa, Artificial Sequence
  Description of Artificial Sequence: Synthetic peptide
  N-term Ac
  MOD_RES (1)..(1): N-methyl-Leu
  MOD_RES (4)..(4): Alpha-Me R8-octenyl-alanine olefin amino acid connected by an all-carbon crosslinker comprising one double bond
  misc_feature (4)..(11): Crosslink between residues
  MOD_RES (11)..(11): Alpha-Me S5-pentenyl-alanine olefin amino acid connected by an all-carbon crosslinker comprising one double bond
  C-term NH2
LTFAAYWAQLAS

SEQ ID NO: 1427 - protein, 12 aa, Artificial Sequence
  Description of Artificial Sequence: Synthetic peptide
  N-term Ac
  MOD_RES (2)..(2): N-methyl-Thr
  MOD_RES (4)..(4): Alpha-Me R8-octenyl-alanine olefin amino acid connected by an all-carbon crosslinker comprising one double bond
  misc_feature (4)..(11): Crosslink between residues
  MOD_RES (11)..(11): Alpha-Me S5-pentenyl-alanine olefin amino acid connected by an all-carbon crosslinker comprising one double bond
  C-term NH2
LTFAAYWAQLAS

SEQ ID NO: 1428 - protein, 12 aa, Artificial Sequence
  Description of Artificial Sequence: Synthetic peptide
  N-term Ac
  MOD_RES (2)..(2): Sarcosine
  MOD_RES (4)..(4): Alpha-Me R8-octenyl-alanine olefin amino acid connected by an all-carbon crosslinker comprising one double bond
  misc_feature (4)..(11): Crosslink between residues
  MOD_RES (11)..(11): Alpha-Me S5-pentenyl-alanine olefin amino acid connected by an all-carbon crosslinker comprising one double bond
  C-term NH2
LXFAAYWAQLAS

SEQ ID NO: 1429 - protein, 11 aa, Artificial Sequence
  Description of Artificial Sequence: Synthetic peptide
  N-term Ac
  MOD_RES (3)..(3): Alpha-Me R8-octenyl-alanine olefin amino acid connected by an all-carbon crosslinker comprising one double bond
  misc_feature (3)..(10): Crosslink between residues
  MOD_RES (10)..(10): Alpha-Me S5-pentenyl-alanine olefin amino acid connected by an all-carbon crosslinker comprising one double bond
  C-term NH2
TFAAYWAQLAS

SEQ ID NO: 1430 - protein, 12 aa, Artificial Sequence
  Description of Artificial Sequence: Synthetic peptide
  N-term Ac
  MOD_RES (4)..(4): Alpha-Me R8-octenyl-alanine olefin amino acid connected by an all-carbon crosslinker comprising one double bond
  misc_feature (4)..(11): Crosslink between residues
  MOD_RES (11)..(11): Alpha-Me S5-pentenyl-alanine olefin amino acid connected by an all-carbon crosslinker comprising one double bond
  C-term NH2
ETFAAYWAQLAA

SEQ ID NO: 1431 - protein, 12 aa, Artificial Sequence
  Description of Artificial Sequence: Synthetic peptide
  N-term Ac
  MOD_RES (4)..(4): Alpha-Me R8-octenyl-alanine olefin amino acid connected by an all-carbon crosslinker comprising one double bond
  misc_feature (4)..(11): Crosslink between residues
  MOD_RES (11)..(11): Alpha-Me S5-pentenyl-alanine olefin amino acid connected by an all-carbon crosslinker comprising one double bond
  C-term NH2
LTFAEYWAQLAA

SEQ ID NO: 1432 - protein, 12 aa, Artificial Sequence
  Description of Artificial Sequence: Synthetic peptide
  N-term Ac
  MOD_RES (4)..(4): Alpha-Me R8-octenyl-alanine olefin amino acid connected by an all-carbon crosslinker comprising one double bond
  misc_feature (4)..(11): Crosslink between residues
  MOD_RES (11)..(11): Alpha-Me S5-pentenyl-alanine olefin amino acid connected by an all-carbon crosslinker comprising one double bond
  C-term NH2
WTFAVYWSQLAS

SEQ ID NO: 1433 - protein, 12 aa, Artificial Sequence
  Description of Artificial Sequence: Synthetic peptide
  N-term Ac
  MOD_RES (4)..(4): Alpha-Me R8-octenyl-alanine olefin amino acid connected by an all-carbon crosslinker comprising one double bond
  misc_feature (4)..(11): Crosslink between residues
  MOD_RES (11)..(11): Alpha-Me S5-pentenyl-alanine olefin amino acid connected by an all-carbon crosslinker comprising one double bond
  C-term NH2
YTFAFYWSQLAS

SEQ ID NO: 1434 - protein, 10 aa, Artificial Sequence
  Description of Artificial Sequence: Synthetic peptide
  N-term Ac
  MOD_RES (2)..(2): Alpha-Me R8-octenyl-alanine olefin amino acid connected by an all-carbon crosslinker comprising one double bond
  misc_feature (2)..(9): Crosslink between residues
  MOD_RES (5)..(5): 6cl-Trp
  MOD_RES (9)..(9): Alpha-Me S5-pentenyl-alanine olefin amino acid connected by an all-carbon crosslinker comprising one double bond
  C-term NH2
FAAYWSALAA

SEQ ID NO: 1435 - protein, 12 aa, Artificial Sequence
  Description of Artificial Sequence: Synthetic peptide
  N-term Ac
  MOD_RES (4)..(4): Alpha-Me R8-octenyl-alanine olefin amino acid connected by an all-carbon crosslinker comprising one double bond
  misc_feature (4)..(11): Crosslink between residues
  MOD_RES (11)..(11): Alpha-Me S5-pentenyl-alanine olefin amino acid connected by an all-carbon crosslinker comprising one double bond
  C-term NH2
ETFAEYWVQLAS

SEQ ID NO: 1436 - protein, 12 aa, Artificial Sequence
  Description of Artificial Sequence: Synthetic peptide
  N-term Ac
  MOD_RES (4)..(4): Alpha-Me R8-octenyl-alanine olefin amino acid connected by an all-carbon crosslinker comprising one double bond
  misc_feature (4)..(11): Crosslink between residues
  MOD_RES (11)..(11): Alpha-Me S5-pentenyl-alanine olefin amino acid connected by an all-carbon crosslinker comprising one double bond
  C-term NH2
ETFAEHWAQLAA

SEQ ID NO: 1437 - protein, 12 aa, Artificial Sequence
  Description of Artificial Sequence: Synthetic peptide
  N-term Ac
  MOD_RES (4)..(4): Alpha-Me R8-octenyl-alanine olefin amino acid connected by an all-carbon crosslinker comprising one double bond
  misc_feature (4)..(11): Crosslink between residues
  MOD_RES (11)..(11): Alpha-Me S5-pentenyl-alanine olefin amino acid connected by an all-carbon crosslinker comprising one double bond
  C-term NH2
ITFAEYWAQLAS

SEQ ID NO: 1438 - protein, 12 aa, Artificial Sequence
  Description of Artificial Sequence: Synthetic peptide
  N-term Ac
  MOD_RES (4)..(4): Alpha-Me R8-octenyl-alanine olefin amino acid connected by an all-carbon crosslinker comprising one double bond
  misc_feature (4)..(11): Crosslink between residues
  MOD_RES (11)..(11): Alpha-Me S5-pentenyl-alanine olefin amino acid connected by an all-carbon crosslinker comprising one double bond
  C-term NH2
ITFAEHWVQLAA

SEQ ID NO: 1439 - protein, 12 aa, Artificial Sequence
  Description of Artificial Sequence: Synthetic peptide
  N-term Ac
  MOD_RES (4)..(4): Alpha-Me R8-octenyl-alanine olefin amino acid connected by an all-carbon crosslinker comprising one double bond
  misc_feature (4)..(11): Crosslink between residues
  MOD_RES (11)..(11): Alpha-Me S5-pentenyl-alanine olefin amino acid connected by an all-carbon crosslinker comprising one double bond
  C-term NH2
ITFAEHWAQLAS

SEQ ID NO: 1440 - protein, 12 aa, Artificial Sequence
  Description of Artificial Sequence: Synthetic peptide
  N-term Ac
  MOD_RES (3)..(3): Phe-4F
  MOD_RES (4)..(4): Alpha-Me R8-octenyl-alanine olefin amino acid connected by an all-carbon crosslinker comprising one double bond
  misc_feature (4)..(11): Crosslink between residues
  MOD_RES (10)..(10): Cyclobutyl-Ala
  MOD_RES (11)..(11): Alpha-Me S5-pentenyl-alanine olefin amino acid connected by an all-carbon crosslinker comprising one double bond
  C-term NH2
LTFAAYWAQAAS

SEQ ID NO: 1441 - protein, 12 aa, Artificial Sequence
  Description of Artificial Sequence: Synthetic peptide
  N-term Ac
  MOD_RES (3)..(3): 3-Chloro-Phe
  MOD_RES (4)..(4): Alpha-Me R8-octenyl-alanine olefin amino acid connected by an all-carbon crosslinker comprising one double bond
  misc_feature (4)..(11): Crosslink between residues
  MOD_RES (10)..(10): hLeu
  MOD_RES (11)..(11): Alpha-Me S5-pentenyl-alanine olefin amino acid connected by an all-carbon crosslinker comprising one double bond
  C-term NH2
LTFAAYWAQLAS

SEQ ID NO: 1442 - protein, 12 aa, Artificial Sequence
  Description of Artificial Sequence: Synthetic peptide
  N-term Ac
  MOD_RES (3)..(3): 3-Chloro-Phe
  MOD_RES (4)..(4): Alpha-Me R8-octenyl-alanine olefin amino acid connected by an all-carbon crosslinker comprising one double bond
  misc_feature (4)..(11): Crosslink between residues
  MOD_RES (10)..(10): Cyclohexyl-Ala
  MOD_RES (11)..(11): Alpha-Me S5-pentenyl-alanine olefin amino acid connected by an all-carbon crosslinker comprising one double bond
  C-term NH2
LTFAAYWAQAAS

SEQ ID NO: 1443 - protein, 12 aa, Artificial Sequence
  Description of Artificial Sequence: Synthetic peptide
  N-term Ac
  MOD_RES (3)..(3): 3-Chloro-Phe
  MOD_RES (4)..(4): Alpha-Me R8-octenyl-alanine olefin amino acid connected by an all-carbon crosslinker comprising one double bond
  misc_feature (4)..(11): Crosslink between residues
  MOD_RES (10)..(10): Cyclohexyl-Gly
  MOD_RES (11)..(11): Alpha-Me S5-pentenyl-alanine olefin amino acid connected by an all-carbon crosslinker comprising one double bond
  C-term NH2
LTFAAYWAQGAS

SEQ ID NO: 1444 - protein, 12 aa, Artificial Sequence
  Description of Artificial Sequence: Synthetic peptide
  N-term Ac
  MOD_RES (3)..(3): 3-Chloro-Phe
  MOD_RES (4)..(4): Alpha-Me R8-octenyl-alanine olefin amino acid connected by an all-carbon crosslinker comprising one double bond
  misc_feature (4)..(11): Crosslink between residues
  MOD_RES (10)..(10): Cyclobutyl-Ala
  MOD_RES (11)..(11): Alpha-Me S5-pentenyl-alanine olefin amino acid connected by an all-carbon crosslinker comprising one double bond
  C-term NH2
LTFAAYWAQAAS

SEQ ID NO: 1445 - protein, 12 aa, Artificial Sequence
  Description of Artificial Sequence: Synthetic peptide
  N-term Ac
  MOD_RES (4)..(4): Alpha-Me R8-octenyl-alanine olefin amino acid connected by an all-carbon crosslinker comprising one double bond
  misc_feature (4)..(11): Crosslink between residues
  MOD_RES (7)..(7): 6cl-Trp
  MOD_RES (11)..(11): Alpha-Me S5-pentenyl-alanine olefin amino acid connected by an all-carbon crosslinker comprising one double bond
  C-term NH2
LTFAAYWSQLAS

SEQ ID NO: 1446 - protein, 12 aa, Artificial Sequence
  Description of Artificial Sequence: Synthetic peptide
  N-term Ac
  MOD_RES (3)..(3): Phe-4F
  MOD_RES (4)..(4): Alpha-Me R8-octenyl-alanine olefin amino acid connected by an all-carbon crosslinker comprising one double bond
  misc_feature (4)..(11): Crosslink between residues
  MOD_RES (10)..(10): hLeu
  MOD_RES (11)..(11): Alpha-Me S5-pentenyl-alanine olefin amino acid connected by an all-carbon crosslinker comprising one double bond
  C-term NH2
LTFAHYWAQLAS

SEQ ID NO: 1447 - protein, 12 aa, Artificial Sequence
  Description of Artificial Sequence: Synthetic peptide
  N-term Ac
  MOD_RES (3)..(3): Phe-4F
  MOD_RES (4)..(4): Alpha-Me R8-octenyl-alanine olefin amino acid connected by an all-carbon crosslinker comprising one double bond
  misc_feature (4)..(11): Crosslink between residues
  MOD_RES (10)..(10): Cyclobutyl-Ala
  MOD_RES (11)..(11): Alpha-Me S5-pentenyl-alanine olefin amino acid connected by an all-carbon crosslinker comprising one double bond
  C-term NH2
LTFAHYWAQAAS

SEQ ID NO: 1448 - protein, 12 aa, Artificial Sequence
  Description of Artificial Sequence: Synthetic peptide
  N-term Ac
  MOD_RES (3)..(3): Phe-4F
  MOD_RES (4)..(4): Alpha-Me R8-octenyl-alanine olefin amino acid connected by an all-carbon crosslinker comprising one double bond
  misc_feature (4)..(11): Crosslink between residues
  MOD_RES (10)..(10): hLeu
  MOD_RES (11)..(11): Alpha-Me S5-pentenyl-alanine olefin amino acid connected by an all-carbon crosslinker comprising one double bond
  C-term NH2
LTFAAYWAQLAS

SEQ ID NO: 1449 - protein, 12 aa, Artificial Sequence
  Description of Artificial Sequence: Synthetic peptide
  N-term Ac
  MOD_RES (3)..(3): Phe-4F
  MOD_RES (4)..(4): Alpha-Me R8-octenyl-alanine olefin amino acid connected by an all-carbon crosslinker comprising one double bond
  misc_feature (4)..(11): Crosslink between residues
  MOD_RES (10)..(10): Cyclohexyl-Gly
  MOD_RES (11)..(11): Alpha-Me S5-pentenyl-alanine olefin amino acid connected by an all-carbon crosslinker comprising one double bond
  C-term NH2
LTFAAYWAQGAS

SEQ ID NO: 1450 - protein, 12 aa, Artificial Sequence
  Description of Artificial Sequence: Synthetic peptide
  N-term Ac
  MOD_RES (4)..(4): Alpha-Me R8-octenyl-alanine olefin amino acid connected by an all-carbon crosslinker comprising one double bond
  misc_feature (4)..(11): Crosslink between residues
  MOD_RES (11)..(11): Alpha-Me S5-pentenyl-alanine olefin amino acid connected by an all-carbon crosslinker comprising one double bond
  C-term NH2
ETFAEYWVALAS

SEQ ID NO: 1451 - protein, 12 aa, Artificial Sequence
  Description of Artificial Sequence: Synthetic peptide
  N-term Ac
  MOD_RES (4)..(4): Alpha-Me R8-octenyl-alanine olefin amino acid connected by an all-carbon crosslinker comprising one double bond
  misc_feature (4)..(11): Crosslink between residues
  MOD_RES (11)..(11): Alpha-Me S5-pentenyl-alanine olefin amino acid connected by an all-carbon crosslinker comprising one double bond
  C-term NH2
ETFAEHWAALAA

SEQ ID NO: 1452 - protein, 12 aa, Artificial Sequence
  Description of Artificial Sequence: Synthetic peptide
  N-term Ac
  MOD_RES (4)..(4): Alpha-Me R8-octenyl-alanine olefin amino acid connected by an all-carbon crosslinker comprising one double bond
  misc_feature (4)..(11): Crosslink between residues
  MOD_RES (11)..(11): Alpha-Me S5-pentenyl-alanine olefin amino acid connected by an all-carbon crosslinker comprising one double bond
  C-term NH2
ITFAEYWAALAS

SEQ ID NO: 1453 - protein, 12 aa, Artificial Sequence
  Description of Artificial Sequence: Synthetic peptide
  N-term Ac
  MOD_RES (4)..(4): Alpha-Me R8-octenyl-alanine olefin amino acid connected by an all-carbon crosslinker comprising one double bond
  misc_feature (4)..(11): Crosslink between residues
  MOD_RES (11)..(11): Alpha-Me S5-pentenyl-alanine olefin amino acid connected by an all-carbon crosslinker comprising one double bond
  C-term NH2
ITFAEHWVALAA

SEQ ID NO: 1454 - protein, 12 aa, Artificial Sequence
  Description of Artificial Sequence: Synthetic peptide
  N-term Ac
  MOD_RES (4)..(4): Alpha-Me R8-octenyl-alanine olefin amino acid connected by an all-carbon crosslinker comprising one double bond
  misc_feature (4)..(11): Crosslink between residues
  MOD_RES (11)..(11): Alpha-Me S5-pentenyl-alanine olefin amino acid connected by an all-carbon crosslinker comprising one double bond
  C-term NH2
ITFAEHWAALAS

SEQ ID NO: 1455 - protein, 12 aa, Artificial Sequence
  Description of Artificial Sequence: Synthetic peptide
  N-term Pam
  MOD_RES (4)..(4): Alpha-Me R8-octenyl-alanine olefin amino acid connected by an all-carbon crosslinker comprising one double bond
  misc_feature (4)..(11): Crosslink between residues
  MOD_RES (11)..(11): Alpha-Me S5-pentenyl-alanine olefin amino acid connected by an all-carbon crosslinker comprising one double bond
  C-term NH2
LTFAEYWAQLAS

SEQ ID NO: 1456 - protein, 12 aa, Artificial Sequence
  Description of Artificial Sequence: Synthetic peptide
  N-term Pam
  MOD_RES (4)..(4): Alpha-Me R8-octenyl-alanine olefin amino acid connected by an all-carbon crosslinker comprising one double bond
  misc_feature (4)..(11): Crosslink between residues
  MOD_RES (11)..(11): Alpha-Me S5-pentenyl-alanine olefin amino acid connected by an all-carbon crosslinker comprising one double bond
  C-term NH2
ETFAEYWAQLAS

SEQ ID NO: 1457 - protein, 12 aa, Artificial Sequence
  Description of Artificial Sequence: Synthetic peptide
  N-term Ac
  MOD_RES (4)..(4): Alpha-Me R8-octenyl-alanine olefin amino acid connected by an all-carbon crosslinker comprising one double bond
  misc_feature (4)..(11): Crosslink between residues
  MOD_RES (11)..(11): Alpha-Me S5-pentenyl-alanine olefin amino acid connected by an all-carbon crosslinker comprising one double bond
  C-term NH2
LTFAAYWLQLAS

SEQ ID NO: 1458 - protein, 12 aa, Artificial Sequence
  Description of Artificial Sequence: Synthetic peptide
  N-term Ac
  MOD_RES (4)..(4): Alpha-Me R8-octenyl-alanine olefin amino acid connected by an all-carbon crosslinker comprising one double bond
  misc_feature (4)..(11): Crosslink between residues
  MOD_RES (11)..(11): Alpha-Me S5-pentenyl-alanine olefin amino acid connected by an all-carbon crosslinker comprising one double bond
  C-term NH2
LTFAEYWLQLAS

SEQ ID NO: 1459 - protein, 12 aa, Artificial Sequence
  Description of Artificial Sequence: Synthetic peptide
  N-term Ac
  MOD_RES (4)..(4): Alpha-Me R8-octenyl-alanine olefin amino acid connected by an all-carbon crosslinker comprising one double bond
  misc_feature (4)..(11): Crosslink between residues
  MOD_RES (11)..(11): Alpha-Me S5-pentenyl-alanine olefin amino acid connected by an all-carbon crosslinker comprising one double bond
  C-term NH2
LTFAEHWLQLAS

SEQ ID NO: 1460 - protein, 12 aa, Artificial Sequence
  Description of Artificial Sequence: Synthetic peptide
  N-term Ac
  MOD_RES (4)..(4): Alpha-Me R8-octenyl-alanine olefin amino acid connected by an all-carbon crosslinker comprising one double bond
  misc_feature (4)..(11): Crosslink between residues
  MOD_RES (11)..(11): Alpha-Me S5-pentenyl-alanine olefin amino acid connected by an all-carbon crosslinker comprising one double bond
  C-term NH2
LTFAVYWAQLAS

SEQ ID NO: 1461 - protein, 12 aa, Artificial Sequence
  Description of Artificial Sequence: Synthetic peptide
  N-term Ac
  MOD_RES (4)..(4): Alpha-Me R8-octenyl-alanine olefin amino acid connected by an all-carbon crosslinker comprising one double bond
  misc_feature (4)..(11): Crosslink between residues
  MOD_RES (11)..(11): Alpha-Me S5-pentenyl-alanine olefin amino acid connected by an all-carbon crosslinker comprising one double bond
  C-term NH2
LTFAAYWSQLAS

SEQ ID NO: 1462 - protein, 12 aa, Artificial Sequence
  Description of Artificial Sequence: Synthetic peptide
  N-term Ac
  MOD_RES (4)..(4): Alpha-Me R8-octenyl-alanine olefin amino acid connected by an all-carbon crosslinker comprising one double bond
  misc_feature (4)..(11): Crosslink between residues
  MOD_RES (11)..(11): Alpha-Me S5-pentenyl-alanine olefin amino acid connected by an all-carbon crosslinker comprising one double bond
  C-term NH2
ETFAAYWAQLAS

SEQ ID NO: 1463 - protein, 12 aa, Artificial Sequence
  Description of Artificial Sequence: Synthetic peptide
  N-term Ac
  MOD_RES (4)..(4): Alpha-Me R8-octenyl-alanine olefin amino acid connected by an all-carbon crosslinker comprising one double bond
  misc_feature (4)..(11): Crosslink between residues
  MOD_RES (11)..(11): Alpha-Me S5-pentenyl-alanine olefin amino acid connected by an all-carbon crosslinker comprising one double bond
  C-term NH2
LTFAEYWAQLAS

SEQ ID NO: 1464 - protein, 12 aa, Artificial Sequence
  Description of Artificial Sequence: Synthetic peptide
  N-term Ac
  MOD_RES (4)..(4): Alpha-Me R8-octenyl-alanine olefin amino acid connected by an all-carbon crosslinker comprising one double bond
  misc_feature (4)..(11): Crosslink between residues
  MOD_RES (11)..(11): Alpha-Me S5-pentenyl-alanine olefin amino acid connected by an all-carbon crosslinker comprising one double bond
  C-term NHAm
LTFAHYWAQLAS

SEQ ID NO: 1465 - protein, 12 aa, Artificial Sequence
  Description of Artificial Sequence: Synthetic peptide
  N-term Ac
  MOD_RES (4)..(4): Alpha-Me R8-octenyl-alanine olefin amino acid connected by an all-carbon crosslinker comprising one double bond
  misc_feature (4)..(11): Crosslink between residues
  MOD_RES (11)..(11): Alpha-Me S5-pentenyl-alanine olefin amino acid connected by an all-carbon crosslinker comprising one double bond
  C-term NHiAm
LTFAHYWAQLAS

SEQ ID NO: 1466 - protein, 12 aa, Artificial Sequence
  Description of Artificial Sequence: Synthetic peptide
  N-term Ac
  MOD_RES (4)..(4): Alpha-Me R8-octenyl-alanine olefin amino acid connected by an all-carbon crosslinker comprising one double bond
  misc_feature (4)..(11): Crosslink between residues
  MOD_RES (11)..(11): Alpha-Me S5-pentenyl-alanine olefin amino acid connected by an all-carbon crosslinker comprising one double bond
  C-term NHnPr3Ph
LTFAHYWAQLAS

SEQ ID NO: 1467 - protein, 12 aa, Artificial Sequence
  Description of Artificial Sequence: Synthetic peptide
  N-term Ac
  MOD_RES (4)..(4): Alpha-Me R8-octenyl-alanine olefin amino acid connected by an all-carbon crosslinker comprising one double bond
  misc_feature (4)..(11): Crosslink between residues
  MOD_RES (11)..(11): Alpha-Me S5-pentenyl-alanine olefin amino acid connected by an all-carbon crosslinker comprising one double bond
  C-term NHnBu3,3Me
LTFAHYWAQLAS

SEQ ID NO: 1468 - protein, 12 aa, Artificial Sequence
  Description of Artificial Sequence: Synthetic peptide
  N-term Ac
  MOD_RES (4)..(4): Alpha-Me R8-octenyl-alanine olefin amino acid connected by an all-carbon crosslinker comprising one double bond
  misc_feature (4)..(11): Crosslink between residues
  MOD_RES (11)..(11): Alpha-Me S5-pentenyl-alanine olefin amino acid connected by an all-carbon crosslinker comprising one double bond
  C-term NHnBu
LTFAHYWAQLAS

SEQ ID NO: 1469 - protein, 12 aa, Artificial Sequence
  Description of Artificial Sequence: Synthetic peptide
  N-term Ac
  MOD_RES (4)..(4): Alpha-Me R8-octenyl-alanine olefin amino acid connected by an all-carbon crosslinker comprising one double bond
  misc_feature (4)..(11): Crosslink between residues
  MOD_RES (11)..(11): Alpha-Me S5-pentenyl-alanine olefin amino acid connected by an all-carbon crosslinker comprising one double bond
  C-term NHnPr
LTFAHYWAQLAS

SEQ ID NO: 1470 - protein, 12 aa, Artificial Sequence
  Description of Artificial Sequence: Synthetic peptide
  N-term Ac
  MOD_RES (4)..(4): Alpha-Me R8-octenyl-alanine olefin amino acid connected by an all-carbon crosslinker comprising one double bond
  misc_feature (4)..(11): Crosslink between residues
  MOD_RES (11)..(11): Alpha-Me S5-pentenyl-alanine olefin amino acid connected by an all-carbon crosslinker comprising one double bond
  C-term NHnEt2Ch
LTFAHYWAQLAS

SEQ ID NO: 1471 - protein, 12 aa, Artificial Sequence
  Description of Artificial Sequence: Synthetic peptide
  N-term Ac
  MOD_RES (4)..(4): Alpha-Me R8-octenyl-alanine olefin amino acid connected by an all-carbon crosslinker comprising one double bond
  misc_feature (4)..(11): Crosslink between residues
  MOD_RES (11)..(11): Alpha-Me S5-pentenyl-alanine olefin amino acid connected by an all-carbon crosslinker comprising one double bond
  C-term NHHex
LTFAHYWAQLAS

SEQ ID NO: 1472 - protein, 12 aa, Artificial Sequence
  Description of Artificial Sequence: Synthetic peptide
  N-term Ac
  MOD_RES (4)..(4): Alpha-Me R8-octenyl-alanine olefin amino acid connected by an all-carbon crosslinker comprising one double bond
  misc_feature (4)..(11): Crosslink between residues
  MOD_RES (11)..(11): Alpha-Me S5-pentenyl-alanine olefin amino acid connected by an all-carbon crosslinker comprising one double bond
  C-term NHmdPeg2
LTFAAYWAQLAS

SEQ ID NO: 1473 - protein, 12 aa, Artificial Sequence
  Description of Artificial Sequence: Synthetic peptide
  N-term Ac
  MOD_RES (4)..(4): Alpha-Me R8-octenyl-alanine olefin amino acid connected by an all-carbon crosslinker comprising one double bond
  misc_feature (4)..(11): Crosslink between residues
  MOD_RES (11)..(11): Alpha-Me S5-pentenyl-alanine olefin amino acid connected by an all-carbon crosslinker comprising one double bond
  C-term NHmdPeg2
LTFAAYWAQLAA

SEQ ID NO: 1474 - protein, 12 aa, Artificial Sequence
  Description of Artificial Sequence: Synthetic peptide
  N-term Ac
  MOD_RES (4)..(4): Alpha-Me R5-pentenyl-alanine olefin amino acid connected by an all-carbon crosslinker comprising one double bond
  misc_feature (4)..(11): Crosslink between residues
  MOD_RES (11)..(11): Alpha-Me S8-octenyl-alanine olefin amino acid connected by an all-carbon crosslinker comprising one double bond
  C-term NH2
LTFAAYWAALAS

SEQ ID NO: 1475 - protein, 12 aa, Artificial Sequence
  Description of Artificial Sequence: Synthetic peptide
  N-term Ac
  MOD_RES (4)..(4): Alpha-Me R8-octenyl-alanine olefin amino acid connected by an all-carbon crosslinker comprising one double bond
  misc_feature (4)..(11): Crosslink between residues
  MOD_RES (8)..(8): Cou
  MOD_RES (11)..(11): Alpha-Me S5-pentenyl-alanine olefin amino acid connected by an all-carbon crosslinker comprising one double bond
  C-term NH2
LTFAAYWXQLAS

SEQ ID NO: 1476 - protein, 12 aa, Artificial Sequence
  Description of Artificial Sequence: Synthetic peptide
  N-term Ac
  MOD_RES (4)..(4): Alpha-Me R8-octenyl-alanine olefin amino acid connected by an all-carbon crosslinker comprising one double bond
  misc_feature (4)..(11): Crosslink between residues
  MOD_RES (5)..(5): Cou
  MOD_RES (11)..(11): Alpha-Me S5-pentenyl-alanine olefin amino acid connected by an all-carbon crosslinker comprising one double bond
  C-term NH2
LTFAXYWAQLAS

SEQ ID NO: 1477 - protein, 12 aa, Artificial Sequence
  Description of Artificial Sequence: Synthetic peptide
  N-term Ac
  MOD_RES (1)..(1): Cou
  MOD_RES (4)..(4): Alpha-Me R8-octenyl-alanine olefin amino acid connected by an all-carbon crosslinker comprising one double bond
  misc_feature (4)..(11): Crosslink between residues
  MOD_RES (11)..(11): Alpha-Me S5-pentenyl-alanine olefin amino acid connected by an all-carbon crosslinker comprising one double bond
  C-term NH2
XTFAAYWAQLAS

SEQ ID NO: 1478 - protein, 12 aa, Artificial Sequence
  Description of Artificial Sequence: Synthetic peptide
  N-term H
  MOD_RES (4)..(4): Alpha-Me R8-octenyl-alanine olefin amino acid connected by an all-carbon crosslinker comprising one double bond
  misc_feature (4)..(11): Crosslink between residues
  MOD_RES (11)..(11): Alpha-Me S5-pentenyl-alanine olefin amino acid connected by an all-carbon crosslinker comprising one double bond
  C-term NH2
LTFAAYWAQLAA

SEQ ID NO: 1479 - protein, 12 aa, Artificial Sequence
  Description of Artificial Sequence: Synthetic peptide
  N-term Ac
  MOD_RES (4)..(4): Alpha-Me R8-octenyl-alanine olefin amino acid connected by an all-carbon crosslinker comprising one double bond
  misc_feature (4)..(11): Crosslink between residues
  MOD_RES (11)..(11): Alpha-Me S5-pentenyl-alanine olefin amino acid connected by an all-carbon crosslinker comprising one double bond
  C-term NH2
HHFAAYWAQLAS

SEQ ID NO: 1480 - protein, 12 aa, Artificial Sequence
  Description of Artificial Sequence: Synthetic peptide
  N-term Ac
  MOD_RES (3)..(3): 2-Naphthalanine
  MOD_RES (4)..(4): Alpha-Me R8-octenyl-alanine olefin amino acid connected by an all-carbon crosslinker comprising one double bond
  misc_feature (4)..(11): Crosslink between residues
  MOD_RES (11)..(11): Alpha-Me S5-pentenyl-alanine olefin amino acid connected by an all-carbon crosslinker comprising one double bond
  C-term NH2
LTAAAYWSQLAS

SEQ ID NO: 1481 - protein, 12 aa, Artificial Sequence
  Description of Artificial Sequence: Synthetic peptide
  N-term Ac
  MOD_RES (4)..(4): Alpha-Me R8-octenyl-alanine olefin amino acid connected by an all-carbon crosslinker comprising one double bond
  misc_feature (4)..(11): Crosslink between residues
  MOD_RES (6)..(6): Cou
  MOD_RES (11)..(11): Alpha-Me S5-pentenyl-alanine olefin amino acid connected by an all-carbon crosslinker comprising one double bond
  C-term NH2
LTFAHXWAQLAS

SEQ ID NO: 1482 - protein, 12 aa, Artificial Sequence
  Description of Artificial Sequence: Synthetic peptide
  N-term Ac
  MOD_RES (4)..(4): Alpha-Me R8-octenyl-alanine olefin amino acid connected by an all-carbon crosslinker comprising one double bond
  misc_feature (4)..(11): Crosslink between residues
  MOD_RES (8)..(8): Cou2
  MOD_RES (11)..(11): Alpha-Me S5-pentenyl-alanine olefin amino acid connected by an all-carbon crosslinker comprising one double bond
  C-term NH2
LTFAAYWXQLAS

SEQ ID NO: 1483 - protein, 12 aa, Artificial Sequence
  Description of Artificial Sequence: Synthetic peptide
  N-term Ac
  MOD_RES (4)..(4): Alpha-Me R8-octenyl-alanine olefin amino acid connected by an all-carbon crosslinker comprising one double bond
  misc_feature (4)..(11): Crosslink between residues
  MOD_RES (5)..(5): Cou2
  MOD_RES (11)..(11): Alpha-Me S5-pentenyl-alanine olefin amino acid connected by an all-carbon crosslinker comprising one double bond
  C-term NH2
LTFAXYWAQLAS

SEQ ID NO: 1484 - protein, 12 aa, Artificial Sequence
  Description of Artificial Sequence: Synthetic peptide
  N-term Ac
  MOD_RES (1)..(1): Cou2
  MOD_RES (4)..(4): Alpha-Me R8-octenyl-alanine olefin amino acid connected by an all-carbon crosslinker comprising one double bond
  misc_feature (4)..(11): Crosslink between residues
  MOD_RES (11)..(11): Alpha-Me S5-pentenyl-alanine olefin amino acid connected by an all-carbon crosslinker comprising one double bond
  C-term NH2
XTFAAYWAQLAS

SEQ ID NO: 1485 - protein, 12 aa, Artificial Sequence
  Description of Artificial Sequence: Synthetic peptide
  N-term Ac
  MOD_RES (4)..(4): Alpha-Me R8-octenyl-alanine olefin amino acid connected by an all-carbon crosslinker comprising one double bond
  misc_feature (4)..(11): Crosslink between residues
  MOD_RES (6)..(6): Cou2
  MOD_RES (11)..(11): Alpha-Me S5-pentenyl-alanine olefin amino acid connected by an all-carbon crosslinker comprising one double bond
  C-term NH2
LTFAAXWAQLAS

SEQ ID NO: 1486 - protein, 12 aa, Artificial Sequence
  Description of Artificial Sequence: Synthetic peptide
  N-term Dmaac
  MOD_RES (4)..(4): Alpha-Me R8-octenyl-alanine olefin amino acid connected by an all-carbon crosslinker comprising one double bond
  misc_feature (4)..(11): Crosslink between residues
  MOD_RES (11)..(11): Alpha-Me S5-pentenyl-alanine olefin amino acid connected by an all-carbon crosslinker comprising one double bond
  C-term NH2
LTFAAYWAQLAS

SEQ ID NO: 1487 - protein, 12 aa, Artificial Sequence
  Description of Artificial Sequence: Synthetic peptide
  N-term Hexac
  MOD_RES (4)..(4): Alpha-Me R8-octenyl-alanine olefin amino acid connected by an all-carbon crosslinker comprising one double bond
  misc_feature (4)..(11): Crosslink between residues
  MOD_RES (11)..(11): Alpha-Me S5-pentenyl-alanine olefin amino acid connected by an all-carbon crosslinker comprising one double bond
  C-term NH2
LTFAAYWAQLAS

SEQ ID NO: 1488 - protein, 12 aa, Artificial Sequence
  Description of Artificial Sequence: Synthetic peptide
  N-term Napac
  MOD_RES (4)..(4): Alpha-Me R8-octenyl-alanine olefin amino acid connected by an all-carbon crosslinker comprising one double bond
  misc_feature (4)..(11): Crosslink between residues
  MOD_RES (11)..(11): Alpha-Me S5-pentenyl-alanine olefin amino acid connected by an all-carbon crosslinker comprising one double bond
  C-term NH2
LTFAAYWAQLAS

SEQ ID NO: 1489 - protein, 12 aa, Artificial Sequence
  Description of Artificial Sequence: Synthetic peptide
  N-term Pam
  MOD_RES (4)..(4): Alpha-Me R8-octenyl-alanine olefin amino acid connected by an all-carbon crosslinker comprising one double bond
  misc_feature (4)..(11): Crosslink between residues
  MOD_RES (11)..(11): Alpha-Me S5-pentenyl-alanine olefin amino acid connected by an all-carbon crosslinker comprising one double bond
  C-term NH2
LTFAAYWAQLAS

SEQ ID NO: 1490 - protein, 12 aa, Artificial Sequence
  Description of Artificial Sequence: Synthetic peptide
  N-term Ac
  MOD_RES (3)..(3): 2-Naphthalanine
  MOD_RES (4)..(4): Alpha-Me R8-octenyl-alanine olefin amino acid connected by an all-carbon crosslinker comprising one double bond
  misc_feature (4)..(11): Crosslink between residues
  MOD_RES (11)..(11): Alpha-Me S5-pentenyl-alanine olefin amino acid connected by an all-carbon crosslinker comprising one double bond
  C-term NH2
LTAAHYAAQLAS

SEQ ID NO: 1491 - protein, 12 aa, Artificial Sequence
  Description of Artificial Sequence: Synthetic peptide
  N-term Ac
  MOD_RES (3)..(3): 2-Naphthalanine
  MOD_RES (4)..(4): Alpha-Me R8-octenyl-alanine olefin amino acid that is not connected by a crosslinker
  MOD_RES (11)..(11): Alpha-Me S5-pentenyl-alanine olefin amino acid that is not connected by a crosslinker
  C-term NH2
LTAAHYWAQLAS

SEQ ID NO: 1492 - protein, 12 aa, Artificial Sequence
  Description of Artificial Sequence: Synthetic peptide
  N-term Ac
  MOD_RES (3)..(3): 2-Naphthalanine
  MOD_RES (4)..(4): Alpha-Me R8-octenyl-alanine olefin amino acid connected by an all-carbon crosslinker comprising one double bond
  misc_feature (4)..(11): Crosslink between residues
  MOD_RES (11)..(11): Alpha-Me S5-pentenyl-alanine olefin amino acid connected by an all-carbon crosslinker comprising one double bond
  C-term NH2
LTAAHYFAQLAS

SEQ ID NO: 1493 - protein, 12 aa, Artificial Sequence
  Description of Artificial Sequence: Synthetic peptide
  N-term Ac
  MOD_RES (3)..(3): 2-Naphthalanine
  MOD_RES (4)..(4): Alpha-Me R8-octenyl-alanine olefin amino acid connected by an all-carbon crosslinker comprising one double bond
  misc_feature (4)..(11): Crosslink between residues
  MOD_RES (11)..(11): Alpha-Me S5-pentenyl-alanine olefin amino acid connected by an all-carbon crosslinker comprising one double bond
  C-term NH2
LTAAHWAAQLAS

SEQ ID NO: 1494 - protein, 12 aa, Artificial Sequence
  Description of Artificial Sequence: Synthetic peptide
  N-term Ac
  MOD_RES (3)..(3): 2-Naphthalanine
  MOD_RES (4)..(4): Alpha-Me R8-octenyl-alanine olefin amino acid connected by an all-carbon crosslinker comprising one double bond
  misc_feature (4)..(11): Crosslink between residues
  MOD_RES (11)..(11): Alpha-Me S5-pentenyl-alanine olefin amino acid connected by an all-carbon crosslinker comprising one double bond
  C-term NH2
LTAAHYAWQLAS

SEQ ID NO: 1495 - protein, 12 aa, Artificial Sequence
  Description of Artificial Sequence: Synthetic peptide
  N-term Ac
  MOD_RES (3)..(3): 2-Naphthalanine
  MOD_RES (4)..(4): Alpha-Me R8-octenyl-alanine olefin amino acid connected by an all-carbon crosslinker comprising one double bond
  misc_feature (4)..(11): Crosslink between residues
  MOD_RES (11)..(11): Alpha-Me S5-pentenyl-alanine olefin amino acid connected by an all-carbon crosslinker comprising one double bond
  C-term NH2
LTAAHYAAQWAS

SEQ ID NO: 1496 - protein, 12 aa, Artificial Sequence
  Description of Artificial Sequence: Synthetic peptide
  N-term Ac
  MOD_RES (4)..(4): Alpha-Me R8-octenyl-alanine olefin amino acid connected by an all-carbon crosslinker comprising one double bond
  misc_feature (4)..(11): Crosslink between residues
  MOD_RES (11)..(11): Alpha-Me S5-pentenyl-alanine olefin amino acid connected by an all-carbon crosslinker comprising one double bond
  C-term NH2
LTWAHYWAQLAS

SEQ ID NO: 1497 - protein, 12 aa, Artificial Sequence
  Description of Artificial Sequence: Synthetic peptide
  N-term Ac
  MOD_RES (3)..(3): 1-Naphthalanine
  MOD_RES (4)..(4): Alpha-Me R8-octenyl-alanine olefin amino acid connected by an all-carbon crosslinker comprising one double bond
  misc_feature (4)..(11): Crosslink between residues
  MOD_RES (11)..(11): Alpha-Me S5-pentenyl-alanine olefin amino acid connected by an all-carbon crosslinker comprising one double bond
  C-term NH2
LTAAHYWAQLAS

SEQ ID NO: 1498 - protein, 12 aa, Artificial Sequence
  Description of Artificial Sequence: Synthetic peptide
  N-term Ac
  MOD_RES (1)..(12): D-amino acid
  C-term NH2
TAWYANFEKLLR

SEQ ID NO: 1499 - protein, 12 aa, Artificial Sequence
  Description of Artificial Sequence: Synthetic peptide
  N-term Ac
  MOD_RES (1)..(6): D-amino acid
  MOD_RES (7)..(7): D-Phe-4CF3
  MOD_RES (8)..(12): D-amino acid
  C-term NH2
TAWYANFEKLLR

SEQ ID NO: 1500 - protein, 16 aa, Artificial Sequence
  Description of Artificial Sequence: Synthetic peptide
  N-term Ac
  MOD_RES (4)..(4): Any amino acid available for crosslinking
  misc_feature (4)..(10): Crosslink between residues
  MOD_RES (10)..(10): Any amino acid available for crosslinking
  C-term NH2
  see specification as filed for detailed description of substitutions and preferred embodiments
LTFXEYWAQXAAAAAA

SEQ ID NO: 1501 - protein, 6 aa, Artificial Sequence
  Description of Artificial Sequence: Synthetic 6xHis tag
HHHHHH

1. A peptidomimetic macrocycle of Formula: [chemical structure]
wherein:
each of Xaa₃, Xaa₅, Xaa₆, Xaa₇, Xaa₈, Xaa₉, and Xaa₁₀ is individually an amino acid, wherein at least three of Xaa₃, Xaa₅, Xaa₆, Xaa₇, Xaa₈, Xaa₉, and Xaa₁₀ are the same amino acid as the amino acid at the corresponding position of the sequence Phe₃-X₄—His₅-Tyr₆-Trp₇-Ala₈-Gln₉-Leu₁₀-X₁₁—Ser₁₂, where each X is an amino acid;
each D and E is independently an amino acid;
R₁ and R₂ are independently —H, alkyl, alkenyl, alkynyl, arylalkyl, cycloalkyl, cycloalkylalkyl, heteroalkyl, or heterocycloalkyl, unsubstituted or substituted with halo-; or at least one of R₁ and R₂ forms a macrocycle-forming linker L′ connected to the alpha position of one of said D or E amino acids;
each L or L′ is independently a macrocycle-forming linker of the formula -L₁-L₂-;
L₁ and L₂ are independently alkylene, alkenylene, alkynylene, heteroalkylene, cycloalkylene, heterocycloalkylene, cycloarylene, heterocycloarylene, or [—R₄—K—R₄—]ₙ, each being optionally substituted with R₅;
R₃ is hydrogen, alkyl, alkenyl, alkynyl, arylalkyl, heteroalkyl, cycloalkyl, heterocycloalkyl, cycloalkylalkyl, cycloaryl, or heterocycloaryl, optionally substituted with R₅;
each R₄ is alkylene, alkenylene, alkynylene, heteroalkylene, cycloalkylene, heterocycloalkylene, arylene, or heteroarylene;
each K is O, S, SO, SO₂, CO, CO₂, or CONR₃;
each R₅ is independently halogen, alkyl, —OR₆, —N(R₆)₂, —SR₆, —SOR₆, —SO₂R₆, —CO₂R₆, a fluorescent moiety, a radioisotope or a therapeutic agent;
each R₆ is independently —H, alkyl, alkenyl, alkynyl, arylalkyl, cycloalkylalkyl, heterocycloalkyl, a fluorescent moiety, a radioisotope or a therapeutic agent;
R₇ is —H, alkyl, alkenyl, alkynyl, arylalkyl, cycloalkyl, heteroalkyl, cycloalkylalkyl, heterocycloalkyl, cycloaryl, or heterocycloaryl, optionally substituted with R₅, or part of a cyclic structure with a D residue;
R₈ is —H, alkyl, alkenyl, alkynyl, arylalkyl, cycloalkyl, heteroalkyl, cycloalkylalkyl, heterocycloalkyl, cycloaryl, or heterocycloaryl, optionally substituted with R₅, or part of a cyclic structure with an E residue;
v is an integer from 1-1000, for example 1-500, 1-200, 1-100, 1-50, 1-30, 1-20, or 1-10;
w is an integer from 3-1000, for example 3-500, 3-200, 3-100, 3-50, 3-30, 3-20, or 3-10; and
n is an integer from 1-5.

2. A peptidomimetic macrocycle of Formula: [chemical structure]
wherein:
each of Xaa₃, Xaa₅, Xaa₆, Xaa₇, Xaa₈, Xaa₉, and Xaa₁₀ is individually an amino acid, wherein at least three of Xaa₃, Xaa₅, Xaa₆, Xaa₇, Xaa₈, Xaa₉, and Xaa₁₀ are the same amino acid as the amino acid at the corresponding position of the sequence Phe₃-X₄-Glu₅-Tyr₆-Trp₇-Ala₈-Gln₉-Leu₁₀/Cba₁₀-X₁₁-Ala₁₂, where each X is an amino acid;
each D and E is independently an amino acid;
R₁ and R₂ are independently —H, alkyl, alkenyl, alkynyl, arylalkyl, cycloalkyl, cycloalkylalkyl, heteroalkyl, or heterocycloalkyl, unsubstituted or substituted with halo-; or at least one of R₁ and R₂ forms a macrocycle-forming linker L′ connected to the alpha position of one of said D or E amino acids;
each L or L′ is independently a macrocycle-forming linker of the formula -L₁-L₂-;
L₁ and L₂ are independently alkylene, alkenylene, alkynylene, heteroalkylene, cycloalkylene, heterocycloalkylene, cycloarylene, heterocycloarylene, or [—R₄—K—R₄—]ₙ, each being optionally substituted with R₅;
R₃ is hydrogen, alkyl, alkenyl, alkynyl, arylalkyl, heteroalkyl, cycloalkyl, heterocycloalkyl, cycloalkylalkyl, cycloaryl, or heterocycloaryl, optionally substituted with R₅;
each R₄ is alkylene, alkenylene, alkynylene, heteroalkylene, cycloalkylene, heterocycloalkylene, arylene, or heteroarylene;
each K is O, S, SO, SO₂, CO, CO₂, or CONR₃;
each R₅ is independently halogen, alkyl, —OR₆, —N(R₆)₂, —SR₆, —SOR₆, —SO₂R₆, —CO₂R₆, a fluorescent moiety, a radioisotope or a therapeutic agent;
each R₆ is independently —H, alkyl, alkenyl, alkynyl, arylalkyl, cycloalkylalkyl, heterocycloalkyl, a fluorescent moiety, a radioisotope or a therapeutic agent;
R₇ is —H, alkyl, alkenyl, alkynyl, arylalkyl, cycloalkyl, heteroalkyl, cycloalkylalkyl, heterocycloalkyl, cycloaryl, or heterocycloaryl, optionally substituted with R₅, or part of a cyclic structure with a D residue;
R₈ is —H, alkyl, alkenyl, alkynyl, arylalkyl, cycloalkyl, heteroalkyl, cycloalkylalkyl, heterocycloalkyl, cycloaryl, or heterocycloaryl, optionally substituted with R₅, or part of a cyclic structure with an E residue;
v is an integer from 1-1000, for example 1-500, 1-200, 1-100, 1-50, 1-30, 1-20, or 1-10;
w is an integer from 3-1000, for example 3-500, 3-200, 3-100, 3-50, 3-30, 3-20, or 3-10; and
n is an integer from 1-5.

3. The peptidomimetic macrocycle of claim 2, wherein the peptidomimetic macrocycle has improved binding affinity to MDM2 or MDMX relative to a corresponding peptidomimetic macrocycle where w is 0, 1 or 2.

4. The peptidomimetic macrocycle of claim 2, wherein the peptidomimetic macrocycle has a reduced ratio of binding affinities to MDMX versus MDM2 relative to a corresponding peptidomimetic macrocycle where w is 0, 1 or 2.

5. The peptidomimetic macrocycle of claim 2, wherein the peptidomimetic macrocycle has improved in vitro anti-tumor efficacy against p53 positive tumor cell lines relative to a corresponding peptidomimetic macrocycle where w is 0, 1 or 2.

6. The peptidomimetic macrocycle of claim 2, wherein the peptidomimetic macrocycle shows improved in vitro induction of apoptosis in p53 positive tumor cell lines relative to a corresponding peptidomimetic macrocycle where w is 0, 1 or 2.

7. The peptidomimetic macrocycle of claim 2, wherein the peptidomimetic macrocycle has an improved in vitro anti-tumor efficacy ratio for p53 positive versus p53 negative or mutant tumor cell lines relative to a corresponding peptidomimetic macrocycle where w is 0, 1 or 2.

8. The peptidomimetic macrocycle of claim 2, wherein the peptidomimetic macrocycle has improved in vivo anti-tumor efficacy against p53 positive tumors relative to a corresponding peptidomimetic macrocycle where w is 0, 1 or 2.

9. The peptidomimetic macrocycle of claim 2, wherein the peptidomimetic macrocycle has improved in vivo induction of apoptosis in p53 positive tumors relative to a corresponding peptidomimetic macrocycle where w is 0, 1 or 2.

10. The peptidomimetic macrocycle of claim 2, wherein the peptidomimetic macrocycle has improved cell permeability relative to a corresponding peptidomimetic macrocycle where w is 0, 1 or 2.

11. The peptidomimetic macrocycle of claim 2, wherein the peptidomimetic macrocycle has improved solubility relative to a corresponding peptidomimetic macrocycle where w is 0, 1 or 2.

12. The peptidomimetic macrocycle of claim 2, wherein Xaa₅ is Glu or an amino acid analog thereof.

13. The peptidomimetic macrocycle of claim 12, wherein Xaa₅ is Glu or an amino acid analog thereof and, wherein the peptidomimetic macrocycle has an improved property, such as improved binding affinity, improved solubility, improved cellular efficacy, improved helicity, improved cell permeability, improved in vivo or in vitro anti-tumor efficacy, or improved induction of apoptosis relative to a corresponding peptidomimetic macrocycle where Xaa₅ is Ala.

14. The peptidomimetic macrocycle of claim 2, wherein each E is independently an amino acid selected from Ala (alanine), D-Ala (D-alanine), Aib (α-aminoisobutyric acid), Sar (N-methyl glycine), and Ser (serine).

15. The peptidomimetic macrocycle of claim 2, wherein [D]ᵥ is -Leu₁-Thr₂.

16. The peptidomimetic macrocycle of claim 2, wherein w is 3-10.

17. The peptidomimetic macrocycle of claim 16, wherein w is 3-6.

18. The peptidomimetic macrocycle of claim 16, wherein w is 6-10.

19. The peptidomimetic macrocycle of claim 16, wherein w is 6.

20. The peptidomimetic macrocycle of claim 2, wherein v is 1-10.

21. The peptidomimetic macrocycle of claim 20, wherein v is 2-10.

22. The peptidomimetic macrocycle of claim 20, wherein v is 2-5.

23. The peptidomimetic macrocycle of claim 20, wherein v is 2.

24. A peptidomimetic macrocycle comprising an amino acid sequence which is at least about 60% identical to an amino acid sequence chosen from the group consisting of the amino acid sequences in Table 1, Table 1a, Table 1b, or Table 1c, wherein the peptidomimetic macrocycle has the formula: [chemical structure]
Formula (I)
wherein:
each A, C, D, and E is independently an amino acid;
B is an amino acid, [chemical structure]
[—NH-L₃-CO—], [—NH-L₃-SO₂—], or [—NH-L₃-];
R₁ and R₂ are independently —H, alkyl, alkenyl, alkynyl, arylalkyl, cycloalkyl, cycloalkylalkyl, heteroalkyl, or heterocycloalkyl, unsubstituted or substituted with halo-; or at least one of R₁ and R₂ forms a macrocycle-forming linker L′ connected to the alpha position of one of said D or E amino acids;
R₃ is hydrogen, alkyl, alkenyl, alkynyl, arylalkyl, heteroalkyl, cycloalkyl, heterocycloalkyl, cycloalkylalkyl, cycloaryl, or heterocycloaryl, optionally substituted with R₅;
each L or L′ is independently a macrocycle-forming linker of the formula -L₁-L₂-;
L₁ and L₂ and L₃ are independently alkylene, alkenylene, alkynylene, heteroalkylene, cycloalkylene, heterocycloalkylene, cycloarylene, heterocycloarylene, or [—R₄—K—R₄—]ₙ, each being optionally substituted with R₅;
each R₄ is alkylene, alkenylene, alkynylene, heteroalkylene, cycloalkylene, heterocycloalkylene, arylene, or heteroarylene;
each K is O, S, SO, SO₂, CO, CO₂, or CONR₃;
each R₅ is independently halogen, alkyl, —OR₆, —N(R₆)₂, —SR₆, —SOR₆, —SO₂R₆, —CO₂R₆, a fluorescent moiety, a radioisotope or a therapeutic agent;
each R₆ is independently —H, alkyl, alkenyl, alkynyl, arylalkyl, cycloalkylalkyl, heterocycloalkyl, a fluorescent moiety, a radioisotope or a therapeutic agent;
R₇ is —H, alkyl, alkenyl, alkynyl, arylalkyl, cycloalkyl, heteroalkyl, cycloalkylalkyl, heterocycloalkyl, cycloaryl, or heterocycloaryl, optionally substituted with R₅, or part of a cyclic structure with a D residue;
R₈ is —H, alkyl, alkenyl, alkynyl, arylalkyl, cycloalkyl, heteroalkyl, cycloalkylalkyl, heterocycloalkyl, cycloaryl, or heterocycloaryl, optionally substituted with R₅, or part of a cyclic structure with an E residue;
v and w are independently integers from 1-1000, for example 1-500, 1-200, 1-100, 1-50, 1-30, 1-20, or 1-10;
u is an integer from 1-10, for example 1-5, 1-3 or 1-2;
x, y and z are independently integers from 0-10, for example the sum of x+y+z is 2, 3, or 6;
n is an integer from 1-5; and
wherein the peptidomimetic macrocycle is not a peptidomimetic macrocycle of Tables 2a or 2b.

25. The peptidomimetic macrocycle of claim 24, wherein each E is independently an amino acid selected from Ala (alanine), D-Ala (D-alanine), Aib (α-aminoisobutyric acid), Sar (N-methyl glycine), and Ser (serine).

26. The peptidomimetic macrocycle of claim 24, wherein [D]ᵥ is -Leu₁-Thr₂.

27. A peptidomimetic macrocycle comprising an amino acid sequence which is at least about 60% identical to an amino acid sequence chosen from the group consisting of the amino acid sequences in Table 1, Table 1a, Table 1b, or Table 1c, wherein the peptidomimetic macrocycle has the formula: [chemical structure]
Formula (I)
wherein:
each A, C, D, and E is independently an amino acid;
B is an amino acid, [chemical structure]
[—NH-L₃-CO—], [—NH-L₃-SO₂—], or [—NH-L₃-];
R₁ and R₂ are independently —H, alkyl, alkenyl, alkynyl, arylalkyl, cycloalkyl, cycloalkylalkyl, heteroalkyl, or heterocycloalkyl, unsubstituted or substituted with halo-; or at least one of R₁ and R₂ forms a macrocycle-forming linker L′ connected to the alpha position of one of said D or E amino acids;
R₃ is hydrogen, alkyl, alkenyl, alkynyl, arylalkyl, heteroalkyl, cycloalkyl, heterocycloalkyl, cycloalkylalkyl, cycloaryl, or heterocycloaryl, optionally substituted with R₅;
each L or L′ is independently a macrocycle-forming linker of the formula -L₁-L₂-;
L₁ and L₂ and L₃ are independently alkylene, alkenylene, alkynylene, heteroalkylene, cycloalkylene, heterocycloalkylene, cycloarylene, heterocycloarylene, or [—R₄—K—R₄—]ₙ, each being optionally substituted with R₅;
each R₄ is alkylene, alkenylene, alkynylene, heteroalkylene, cycloalkylene, heterocycloalkylene, arylene, or heteroarylene;
each K is O, S, SO, SO₂, CO, CO₂, or CONR₃;
each R₅ is independently halogen, alkyl, —OR₆, —N(R₆)₂, —SR₆, —SOR₆, —SO₂R₆, —CO₂R₆, a fluorescent moiety, a radioisotope or a therapeutic agent;
each R₆ is independently —H, alkyl, alkenyl, alkynyl, arylalkyl, cycloalkylalkyl, heterocycloalkyl, a fluorescent moiety, a radioisotope or a therapeutic agent;
R₇ is —H, alkyl, alkenyl, alkynyl, arylalkyl, cycloalkyl, heteroalkyl, cycloalkylalkyl, heterocycloalkyl, cycloaryl, or heterocycloaryl, optionally substituted with R₅, or part of a cyclic structure with a D residue;
R₈ is —H, alkyl, alkenyl, alkynyl, arylalkyl, cycloalkyl, heteroalkyl, cycloalkylalkyl, heterocycloalkyl, cycloaryl, or heterocycloaryl, optionally substituted with R₅, or part of a cyclic structure with an E residue;
v and w are independently integers from 1-1000, for example 1-500, 1-200, 1-100, 1-50, 1-30, 1-20, or 1-10;
u is an integer from 1-10, for example 1-5, 1-3 or 1-2;
x, y and z are independently integers from 0-10, for example the sum of x+y+z is 6;
n is an integer from 1-5;
wherein w>2 and each of the first two amino acid represented by E comprises an uncharged side chain or a negatively charged side chain,
with the proviso that the peptidomimetic macrocycle is not a peptidomimetic macrocycle of Table 2a and does not have the sequence of:
Ac-RTQATF$r8NQWAibAN1e$TNAibTR-NH₂,
Ac-$r8SQQTFS$LWRLLAibQN-NH₂,
Ac-QSQ$r8TFSNLW$LLAibQN-NH2,
Ac-QS$rSQTFStNLW$LLAibQN-NH2, or
Ac-QSQQ$r8FSNLWR$LAibQN-NH2,
wherein Aib represents 2-aminoisobutyric acid, $ represents an alpha-Me S5-pentenyl-alanine olefin amino acid connected by an all-carbon crosslinker comprising one double bond, $r5 represents an alpha-Me R5-pentenyl-alanine olefin amino acids connected by an all-carbon comprising one double bond, and $r8 represents an alpha-Me R8-octenyl-alanine olefin amino acid connected by an all-carbon crosslinker comprising one double bond.

28. The peptidomimetic macrocycle of claim 27, wherein each E is independently an amino acid selected from Ala (alanine), D-Ala (D-alanine), Aib (α-aminoisobutyric acid), Sar (N-methyl glycine), and Ser (serine).

29. The peptidomimetic macrocycle of claim 27, wherein [D]ᵥ is -Leu₁-Thr₂.

30. The peptidomimetic macrocycle of claim 27, wherein the first C-terminal amino acid and/or the second C-terminal amino acid represented by E comprise a hydrophobic side chain.

31. The peptidomimetic macrocycle of claim 30, wherein the hydrophobic chain is a large hydrophobic side chain.

32. A peptidomimetic macrocycle comprising an amino acid sequence which is at least about 60% identical to an amino acid sequence chosen from the group consisting of the amino acid sequences in Table 1, Table 1a, Table 1b, or Table 1c, wherein the peptidomimetic macrocycle has the formula: [chemical structure]
Formula (I)
wherein:
each A, C, D, and E is independently an amino acid;
B is an amino acid, [chemical structure]
[—NH-L₃-CO—], [—NH-L₃-SO₂—], or [—NH-L₃-];
R₁ and R₂ are independently —H, alkyl, alkenyl, alkynyl, arylalkyl, cycloalkyl, cycloalkylalkyl, heteroalkyl, or heterocycloalkyl, unsubstituted or substituted with halo-; or at least one of R₁ and R₂ forms a macrocycle-forming linker L′ connected to the alpha position of one of said D or E amino acids;
R₃ is hydrogen, alkyl, alkenyl, alkynyl, arylalkyl, heteroalkyl, cycloalkyl, heterocycloalkyl, cycloalkylalkyl, cycloaryl, or heterocycloaryl, optionally substituted with R₅;
each L or L′ is independently a macrocycle-forming linker of the formula -L₁-L₂-;
L₁ and L₂ and L₃ are independently alkylene, alkenylene, alkynylene, heteroalkylene, cycloalkylene, heterocycloalkylene, cycloarylene, heterocycloarylene, or [—R₄—K—R₄—]ₙ, each being optionally substituted with R₅;
each R₄ is alkylene, alkenylene, alkynylene, heteroalkylene, cycloalkylene, heterocycloalkylene, arylene, or heteroarylene;
each K is O, S, SO, SO₂, CO, CO₂, or CONR₃;
each R₅ is independently halogen, alkyl, —OR₆, —N(R₆)₂, —SR₆, —SOR₆, —SO₂R₆, —CO₂R₆, a fluorescent moiety, a radioisotope or a therapeutic agent;
each R₆ is independently —H, alkyl, alkenyl, alkynyl, arylalkyl, cycloalkylalkyl, heterocycloalkyl, a fluorescent moiety, a radioisotope or a therapeutic agent;
R₇ is —H, alkyl, alkenyl, alkynyl, arylalkyl, cycloalkyl, heteroalkyl, cycloalkylalkyl, heterocycloalkyl, cycloaryl, or heterocycloaryl, optionally substituted with R₅, or part of a cyclic structure with a D residue;
R₈ is —H, alkyl, alkenyl, alkynyl, arylalkyl, cycloalkyl, heteroalkyl, cycloalkylalkyl, heterocycloalkyl, cycloaryl, or heterocycloaryl, optionally substituted with R₅, or part of a cyclic structure with an E residue;
v and w are independently integers from 1-1000, for example 1-500, 1-200, 1-100, 1-50, 1-30, 1-20, or 1-10;
u is an integer from 1-10, for example 1-5, 1-3 or 1-2;
x, y and z are independently integers from 0-10, for example the sum of x+y+z is 6;
n is an integer from 1-5; and
w>2, wherein the third amino acid represented by E comprises a large hydrophobic side chain,
with the proviso that the peptidomimetic macrocycle is not a peptidomimetic macrocycle of Table 2a and does not have the sequence of:
Ac-Q$r8QQTFSN$WRLLAibQN-NH2.

33. The peptidomimetic macrocycle of claim 32, wherein each E other than the third amino acid represented by E an amino acid selected from Ala (alanine), D-Ala (D-alanine), Aib (α-aminoisobutyric acid), Sar (N-methyl glycine), and Ser (serine).

34. The peptidomimetic macrocycle of claim 32, wherein [D]ᵥ is -Leu₁-Thr₂.

35. The peptidomimetic macrocycle of claim 32, wherein each of the first two amino acid represented by E comprises an uncharged side chain or a negatively charged side chain.

36. The peptidomimetic macrocycle of claim 32, wherein the third amino acid represented by E is amino acid selected from the group consisting of: Isoleucine (I), Leucine (L), Methionine (M), Phenylalanine (F), Trytophan (W), and Tyrosine (Y).

37. The peptidomimetic macrocycle of claim 2, wherein L₁ and L₂ are independently alkylene, alkenylene, alkynylene, heteroalkylene, cycloalkylene, heterocycloalkylene, cycloarylene, or heterocycloarylene, each being optionally substituted with R₅.

38. The peptidomimetic macrocycle of claim 2, wherein L₁ and L₂ are independently alkylene or alkenylene.

39. The peptidomimetic macrocycle of claim 2, wherein L is alkylene, alkenylene, or alkynylene.

40. The peptidomimetic macrocycle of claim 39, wherein L is alkylene.

41. The peptidomimetic macrocycle of claim 40, wherein L is C₃-C₁₆ alkylene.

42. The peptidomimetic macrocycle of claim 41, wherein L is C₁₀-C₁₄ alkylene.

43. The peptidomimetic macrocycle of claim 2, wherein R₁ and R₂ are independently —H, alkyl, alkenyl, alkynyl, arylalkyl, cycloalkyl, cycloalkylalkyl, heteroalkyl, or heterocycloalkyl, unsubstituted or substituted with halo-.

44. The peptidomimetic macrocycle of claim 2, wherein R₁ and R₂ are H.

45. The peptidomimetic macrocycle of claim 2, wherein R₁ and R₂ are independently alkyl.

46. The peptidomimetic macrocycle of claim 45, wherein R₁ and R₂ are methyl.

47. The peptidomimetic macrocycle of claim 2, wherein x+y+z=6.

48. The peptidomimetic macrocycle of claim 2, wherein u is 1.

49. The peptidomimetic macrocycle of claim 2, wherein the peptidomimetic macrocycle is not a macrocycle of Table 2a or Table 2b.

50. The peptidomimetic macrocycle of claim 2, wherein each E is Ser or Ala or an analog thereof.

51. The peptidomimetic macrocycle of claim 2, comprising at least one amino acid which is an amino acid analog.

52. A peptidomimetic macrocycle of claim 2, having formula: [chemical structure]
or a pharmaceutically acceptable salt thereof.

53. A peptidomimetic macrocycle of claim 2, having formula: [chemical structure]
or a pharmaceutically acceptable salt thereof.

54. A peptidomimetic macrocycle of claim 2, having formula: [chemical structure]
or a pharmaceutically acceptable salt thereof.

55. A peptidomimetic macrocycle of claim 2, having formula: [chemical structure]
or a pharmaceutically acceptable salt thereof.

56. A peptidomimetic macrocycle of claim 2, having formula: [chemical structure]
or a pharmaceutically acceptable salt thereof.

57. A peptidomimetic macrocycle of claim 2, having formula: [chemical structure]
or a pharmaceutically acceptable salt thereof.

58. A peptidomimetic macrocycle of claim 2, having formula: [chemical structure]
or a pharmaceutically acceptable salt thereof.

59. A peptidomimetic macrocycle of claim 2, having formula: [chemical structure]
or a pharmaceutically acceptable salt thereof.

60. A peptidomimetic macrocycle of claim 2, having formula: [chemical structure]
or a pharmaceutically acceptable salt thereof.

61. A peptidomimetic macrocycle of claim 2, having formula: [chemical structure]
or a pharmaceutically acceptable salt thereof.

62. A peptidomimetic macrocycle of claim 2, having formula: [chemical structure]
or a pharmaceutically acceptable salt thereof.

63. A peptidomimetic macrocycle of claim 2, having formula: [chemical structure]
or a pharmaceutically acceptable salt thereof

64. A peptidomimetic macrocycle of claim 2, having formula: [chemical structure]
or a pharmaceutically acceptable salt thereof.

65. A peptidomimetic macrocycle of claim 2, having formula: [chemical structure]
or a pharmaceutically acceptable salt thereof.

66. A peptidomimetic macrocycle of claim 2, having formula: [chemical structure]
or a pharmaceutically acceptable salt thereof.

67. A peptidomimetic macrocycle of claim 2, having formula: [chemical structure]
or a pharmaceutically acceptable salt thereof.

68. A peptidomimetic macrocycle of claim 2, having formula: [chemical structure]
or a pharmaceutically acceptable salt thereof.

69. A peptidomimetic macrocycle of claim 2, having formula: [chemical structure]
or a pharmaceutically acceptable salt thereof.

70. A peptidomimetic macrocycle of claim 2, having formula: [chemical structure]
or a pharmaceutically acceptable salt thereof.

71. A peptidomimetic macrocycle of claim 2, having formula: [chemical structure]
or a pharmaceutically acceptable salt thereof.

72. A peptidomimetic macrocycle of claim 2, having formula: [chemical structure]
or a pharmaceutically acceptable salt thereof.

73. A peptidomimetic macrocycle of claim 2, having formula: [chemical structure]
or a pharmaceutically acceptable salt thereof.

74. A peptidomimetic macrocycle of claim 2, having formula: [chemical structure]
or a pharmaceutically acceptable salt thereof.

75. A peptidomimetic macrocycle of claim 2, having formula: [chemical structure]
or a pharmaceutically acceptable salt thereof.

76. A peptidomimetic macrocycle of claim 2, having formula: [chemical structure]
or a pharmaceutically acceptable salt thereof.

77. A peptidomimetic macrocycle of claim 2, having formula: [chemical structure]
or a pharmaceutically acceptable salt thereof.

78. A peptidomimetic macrocycle of claim 2, having formula: [chemical structure]
or a pharmaceutically acceptable salt thereof.

79. A peptidomimetic macrocycle of claim 2, having formula: [chemical structure]
or a pharmaceutically acceptable salt thereof.

80. A peptidomimetic macrocycle of claim 2, having formula: [chemical structure]
or a pharmaceutically acceptable salt thereof.

81. A peptidomimetic macrocycle of claim 2, having formula: [chemical structure]
or a pharmaceutically acceptable salt thereof.

82. A method of treating cancer in a subject comprising administering to the subject a peptidomimetic macrocycle of claim 2.

83. The method of claim 82, wherein the cancer is selected from the group consisting of head and neck cancer, melanoma, lung cancer, breast cancer, and glioma.

84. A method of modulating the activity of p53 and/or MDM2 and/or MDMX in a subject comprising administering to the subject a peptidomimetic macrocycle of claim 2.

85. A method of antagonizing the interaction between p53 and MDM2 and/or between p53 and MDMX proteins in a subject comprising administering to the subject a peptidomimetic macrocycle one claim 2.

86. A method of preparing a composition comprising a peptidomimetic macrocycle of Formula (I): [chemical structure]
comprising an amino acid sequence which is about 60% to about 100% identical to an amino acid sequence selected from the group consisting of the amino acid sequences in Table 1, Table 1a, Table 1b, or Table 1c, the method comprising treating a compound of Formula (II) [chemical structure]
with a catalyst to result in the compound of Formula I
wherein in the compound(s) of Formulae (I) and (II)
each A, C, D, and E is independently an amino acid;
each B is independently an amino acid, [chemical structure]
[—NH-L₃-CO—], [—NH-L₃-SO₂—], or [—NH-L₃-];
each R₁ and R₂ are independently hydrogen, alkyl, alkenyl, alkynyl, arylalkyl, cycloalkyl, cycloalkylalkyl, heteroalkyl, or heterocycloalkyl, unsubstituted or substituted with halogen; or at least one of R₁ and R₂ forms a macrocycle-forming linker L′ connected to the alpha position of one of the D or E amino acids;
each R₃ is independently hydrogen, alkyl, alkenyl, alkynyl, arylalkyl, heteroalkyl, cycloalkyl, heterocycloalkyl, cycloalkylalkyl, cycloaryl, or heterocycloaryl, optionally substituted with R₅;
each L′ is independently a macrocycle-forming linker of the formula -L₁-L₂-;
each L₁, L, and L₃ are independently alkylene, alkenylene, alkynylene, heteroalkylene, cycloalkylene, heterocycloalkylene, cycloarylene, heterocycloarylene, or [—R₄—K—R_{4′}-]ₙ, each being optionally substituted with R₅;
each R₄ and R_{4′}, is independently alkylene, alkenylene, alkynylene, heteroalkylene, cycloalkylene, heterocycloalkylene, arylene, or heteroarylene;
each K is independently O, S, SO, SO₂, CO, CO₂, or CONR₃;
each R₅ is independently halogen, alkyl, —OR₆, —N(R₆)₂, —SR₆, —SOR₆, —SO₂R₆, —CO₂R₆, a fluorescent moiety, a radioisotope or a therapeutic agent;
each R₆ is independently hydrogen, alkyl, alkenyl, alkynyl, arylalkyl, cycloalkylalkyl, heterocycloalkyl, a fluorescent moiety, a radioisotope or a therapeutic agent;
each R₇ is independently hydrogen, alkyl, alkenyl, alkynyl, arylalkyl, cycloalkyl, heteroalkyl, cycloalkylalkyl, heterocycloalkyl, cycloaryl, or heterocycloaryl, optionally substituted with R₅, or part of a cyclic structure with a D residue;
each R₈ is independently hydrogen, alkyl, alkenyl, alkynyl, arylalkyl, cycloalkyl, heteroalkyl, cycloalkylalkyl, heterocycloalkyl, cycloaryl, or heterocycloaryl, optionally substituted with R₅, or part of a cyclic structure with an E residue;
each v and w are independently integers from 1-1000;
u is an integer from 1-10;
each x, y and z are independently integers from 0-10;
each n is independently an integer from 1-5;
each o is independently an integer from 1 to 15;
each p is independently an integer from 1 to 15;
“(E)” indicates a trans double bond; and
one or more of the amino acids A, C and/or B when B is an amino acid, present in the compounds of Formulae (I) and (II), has a side chain bearing a protecting group.

87. The method of claim 86, wherein the protecting group is a nitrogen atom protecting group.

88. The method of claim 86, wherein the protecting group is a Boc group.

89. The method of claim 87, wherein the side chain of the amino acid bearing the protecting group comprises a protected indole.

90. The method of claim 89, wherein the amino acid bearing the protecting group on its side chain is tryptophan (W) that is protected by the protecting group on its indole nitrogen.

91. The method of claim 90, wherein the amino acid bearing the protecting group on its side chain is tryptophan (W) that is protected on its indole nitrogen by a Boc group.

92. The method of claim 86, wherein after the step of contacting the compound of Formula II with catalyst the compound of Formula (I) is obtained in equal or higher amounts than a corresponding compound which is a Z isomer.

93. The method of claim 92, wherein after the step of contacting the compound of Formula II with catalyst the compound of Formula (I) is obtained in a 2, 3, 4, 5, 6, 7, 8, 9, or 10-fold higher amount than the corresponding compound which is a Z isomer.

94. The method of claim 86, wherein the catalyst is a ruthenium catalyst.

95. The method of claim 86, further comprising the step of treating the compounds of Formula (I) with a reducing agent or an oxidizing agent.

96. The method of claim 86, wherein the compound of Formula (II) is attached to a solid support.

97. The method of claim 86, wherein the compound of Formula (II) is not attached to a solid support.

98. The method of claim 86, further comprising removing the protecting group(s) from the compounds of Formula (I).

99. The method of claim 86, wherein the ring closing metathesis is conducted at a temperature ranging from about 20° C. to about 80° C.

100. The method of claim 86, wherein the peptidomimetic macrocycle of Formula (I) has the Formula: [chemical structure]
wherein:
each of Xaa₃, Xaa₅, Xaa₆, Xaa₇, Xaa₈, Xaa₉, and Xaa₁₀ is individually an amino acid, wherein at least two of Xaa₃, Xaa₅, Xaa₆, Xaa₈, Xaa₉, and Xaa₁₀ are the same amino acid as the amino acid at the corresponding position of the sequence Phe₃-X₄—His₅-Tyr₆-Trp₇-Ala₈-Gln₉-Leu₁₀-X₁₁—Ser₁₂, where each X is an amino acid;
each D and E is independently an amino acid;
R₁ and R₂ are independently —H, alkyl, alkenyl, alkynyl, arylalkyl, cycloalkyl, cycloalkylalkyl, heteroalkyl, or heterocycloalkyl, unsubstituted or substituted with halo-; or at least one of R₁ and R₂ forms a macrocycle-forming linker L′ connected to the alpha position of one of said D or E amino acids;
each L or L′ is independently a macrocycle-forming linker of the formula -L₁-L₂-, wherein L comprises at least one double bond in the E configuration;
L₁ and L₂ are independently alkylene, alkenylene, alkynylene, heteroalkylene, cycloalkylene, heterocycloalkylene, cycloarylene, heterocycloarylene, or [—R₄—K—R₄—]ₙ, each being optionally substituted with R₅;
R₃ is hydrogen, alkyl, alkenyl, alkynyl, arylalkyl, heteroalkyl, cycloalkyl, heterocycloalkyl, cycloalkylalkyl, cycloaryl, or heterocycloaryl, optionally substituted with R₅;
each R₄ is alkylene, alkenylene, alkynylene, heteroalkylene, cycloalkylene, heterocycloalkylene, arylene, or heteroarylene;
each K is O, S, SO, SO₂, CO, CO₂, or CONR₃;
each R₅ is independently halogen, alkyl, —OR₆, —N(R₆)₂, —SR₆, —SOR₆, —SO₂R₆, —CO₂R₆, a fluorescent moiety, a radioisotope or a therapeutic agent;
each R₆ is independently —H, alkyl, alkenyl, alkynyl, arylalkyl, cycloalkylalkyl, heterocycloalkyl, a fluorescent moiety, a radioisotope or a therapeutic agent;
R₇ is —H, alkyl, alkenyl, alkynyl, arylalkyl, cycloalkyl, heteroalkyl, cycloalkylalkyl, heterocycloalkyl, cycloaryl, or heterocycloaryl, optionally substituted with R₅, or part of a cyclic structure with a D residue;
R₈ is —H, alkyl, alkenyl, alkynyl, arylalkyl, cycloalkyl, heteroalkyl, cycloalkylalkyl, heterocycloalkyl, cycloaryl, or heterocycloaryl, optionally substituted with R₅, or part of a cyclic structure with an E residue;
v is an integer from 1-1000;
w is an integer from 3-1000;
n is an integer from 1-5; and
Xaa₇ is Boc-protected tryptophan.

101. The method of claim 86, wherein the peptidomimetic macrocycle of Formula (I) has the Formula: [chemical structure]
wherein:
each of Xaa₃, Xaa₅, Xaa₆, Xaa₇, Xaa₈, Xaa₉, and Xaa₁₀ is individually an amino acid, wherein at least two of Xaa₃, Xaa₅, Xaa₆, Xaa₈, Xaa₉, and Xaa₁₀ are the same amino acid as the amino acid at the corresponding position of the sequence Phe₃-X₄-Glu₅-Tyrₒ-Trp₇-Ala₈-Gln₉-Leu₁₀/Cba₁₀-X₁₁-Ala₁₂, where each X is an amino acid;
each D and E is independently an amino acid;
R₁ and R₂ are independently —H, alkyl, alkenyl, alkynyl, arylalkyl, cycloalkyl, cycloalkylalkyl, heteroalkyl, or heterocycloalkyl, unsubstituted or substituted with halo-; or at least one of R₁ and R₂ forms a macrocycle-forming linker L′ connected to the alpha position of one of said D or E amino acids;
each L or L′ is independently a macrocycle-forming linker of the formula -L₁-L₂-, wherein L comprises at least one double bond in the E configuration;
L₁ and L₂ are independently alkylene, alkenylene, alkynylene, heteroalkylene, cycloalkylene, heterocycloalkylene, cycloarylene, heterocycloarylene, or [—R₄—K—R₄—]ₙ, each being optionally substituted with R₅;
R₃ is hydrogen, alkyl, alkenyl, alkynyl, arylalkyl, heteroalkyl, cycloalkyl, heterocycloalkyl, cycloalkylalkyl, cycloaryl, or heterocycloaryl, optionally substituted with R₅;
each R₄ is alkylene, alkenylene, alkynylene, heteroalkylene, cycloalkylene, heterocycloalkylene, arylene, or heteroarylene;
each K is O, S, SO, SO₂, CO, CO₂, or CONR₃;
each R₅ is independently halogen, alkyl, —OR₆, —N(R₆)₂, —SR₆, —SOR₆, —SO₂R₆, —CO₂R₆, a fluorescent moiety, a radioisotope or a therapeutic agent;
each R₆ is independently —H, alkyl, alkenyl, alkynyl, arylalkyl, cycloalkylalkyl, heterocycloalkyl, a fluorescent moiety, a radioisotope or a therapeutic agent;
R₇ is —H, alkyl, alkenyl, alkynyl, arylalkyl, cycloalkyl, heteroalkyl, cycloalkylalkyl, heterocycloalkyl, cycloaryl, or heterocycloaryl, optionally substituted with R₅, or part of a cyclic structure with a D residue;
R₈ is —H, alkyl, alkenyl, alkynyl, arylalkyl, cycloalkyl, heteroalkyl, cycloalkylalkyl, heterocycloalkyl, cycloaryl, or heterocycloaryl, optionally substituted with R₅, or part of a cyclic structure with an E residue;
v is an integer from 1-1000;
w is an integer from 3-1000;
n is an integer from 1-5; and
Xaa₇ is Boc-protected tryptophan.

102. The method of claim 86, wherein the peptidomimetic macrocycle of Formula (I) comprises an α-helix.
